(19) United States
(12) Patent Application Publication
(10) Pub. No.: US 2023/0176070 A1
(43) Pub. Date: Jun. 8, 2023

(54) COMPOSITIONS AND METHODS FOR IDENTIFYING NANOBODIES AND NANOBODY AFFINITIES

(71) Applicant: UNIVERSITY OF PITTSBURGH-OF THE COMMONWEALTH SYSTEM OF HIGHER EDUCATION, Pittsburgh, PA (US)

(72) Inventors: Yi SHI, Wexford, PA (US); Yufei XIANG, Pittsburgh, PA (US); Zhe SANG, Pittsburgh, PA (US)

(21) Appl. No.: 17/922,685

(22) PCT Filed: Apr. 29, 2021
(86) PCT No.: PCT/US21/29869

§ 371 Date: Nov. 1, 2022

Related U.S. Application Data
(60) Provisional application No. 63/018,559, filed on May 1, 2020.

(51) Int. Cl. G01N 33/68; G16B 35/10; G16B 35/20

(52) U.S. Cl. CPC G01N 33/6857; G01N 33/6848; G16B 35/10; G16B 35/20

(57) ABSTRACT

Provided herein are methods of identifying a group of complementarity determining region (CDR)3, 2 and/or 1 nanobody amino acid sequences (CDR3, CDR2 and/or CDR1 sequences) wherein a reduced number of the CDR3, CDR2 and/or CDR1 sequences are false positives as compared to a control, methods for determining antigen affinity of nanobody peptide sequences, and related methods for training a deep learning model.

### CROSS-REFERENCE TO RELATED APPLICATIONS

[0001] This application claims the benefit of U.S. Provisional Application No. 63/018,559, filed May 1, 2020, which is expressly incorporated herein by reference in its entirety.

### BACKGROUND

[0002] Nanobodies (Nbs) are natural antigen-binding fragments derived from the VHH domain of camelid heavy-chain only antibodies (HcAbs). They are characterized by their small size and outstanding structural robustness, excellent solubility and stability, ease of bioengineering and manufacturing, low immunogenicity in humans and fast tissue penetration. For these reasons, Nbs have emerged as promising agents for cutting-edge biomedical, diagnostic and therapeutic applications (Muyldermans, 2013; Beghein, 2017; Rasmussen, 2011; Jovcevska, I. & Muyldermans, S, 2020).

[0003] Display-based technologies have been developed for Nb discovery (Lauwereys, 1998; Pardon, 2014; McMahon, 2018; Egloff, 2019). These methods usually yield a small handful of target synthetic Nbs that bind specific targets with moderate affinities and do not directly analyze naturally circulating, antigen-specific HcAb/Nb repertoires. Recently, mass spectrometry-based proteomics has emerged as a promising technique for Nb discovery (Fridy, 2014). However, significant challenges remain towards a large-scale, sensitive, and reliable analysis of antigen-specific Nb proteomes for at least several reasons: (a) the diversity and dynamic range of circulating antibodies are orders of magnitude higher than any cellular proteome. (b) A Nb sequence database, obtained from an immunized camelid, usually contains millions of unique sequences posing a challenge for accurate database search (Savitski, 2015). (c) This massive database is overrepresented by conserved Nb framework sequences, which provide little specificity for identification. The specificity is largely determined by complementarity-determining regions (CDRs), among which CDR3 loops can be long, rendering it difficult for confident MS analysis. (d) Current methods are limited by the availability of efficient protocols and informatics that enable accurate quantification and classification of large Nb repertoires.

### SUMMARY

[0004] Provided herein is a method of identifying a group of complementarity determining region (CDR)3, 2, and/or 1 nanobody amino acid sequences (CDR3, CDR2 and/or CDR1 sequences) wherein a reduced number of the CDR3, CDR2 and/or CDR1 sequences are false positives as compared to a control, the method comprising: (a) obtaining a blood sample from a camelid immunized with an antigen; (b) using the blood sample to obtain a nanobody cDNA library; (c) identifying the sequence of each cDNA in the library; (d) isolating nanobodies from the same or a second blood sample from the camelid immunized with the antigen; (e) digesting the nanobodies with trypsin or chymotrypsin to create a group of digestion products; (f) performing a mass spectrometry analysis of the digestion products to obtain mass spectrometry data; (g) selecting sequences identified in step c. that correlate with the mass spectrometry data; (h) identifying sequences of CDR3, CDR2 and/or CDR1 regions in the sequences from step g.; and (i) selecting from the CDR3, CDR2 and/or CDR1 region sequences of step h. those sequences having equal to or more than a required fragmentation coverage percentage; wherein the selected sequences of step (i) comprise a group having the reduced number of false positive CDR3, CDR2 and/or CDR1 sequences. In some embodiments, step (d) comprises obtaining plasma from the blood sample and isolating nanobodies using one or more affinity isolation methods. In some aspects, the one or more affinity isolation methods of step (d) comprise one or more of protein G sepharose affinity chromatography and protein A sepharose affinity chromatography. In some aspects, step (d) further comprises a functional selection step comprising selecting antigen-specific nanobodies using an antigen-specific affinity chromatography and eluting the antigen-specific nanobodies under varying degrees of stringency thereby creating different nanobody fractions, and performing steps (e) through (i) on each fraction individually and estimating an affinity of each different step (i) CDR3, CDR2 and/or CDR1 region sequence for the antigen based on a relative abundance of the CDR3, CDR2 and/or CDR1 region sequence, respectively, in each of the nanobody fractions.

[0005] In some embodiments, a group of complementarity determining region (CDR)3 nanobody amino acid sequences (CDR2 sequences) wherein a reduced number of the CDR3 sequences are false positives as compared to a control, the method comprising: (a) obtaining a blood sample from a camelid immunized with an antigen; (b) using the blood sample to obtain a nanobody cDNA library; (c) identifying the sequence of each cDNA in the library; (d) isolating nanobodies from the same or a second blood sample from the camelid immunized with the antigen; (e) digesting the nanobodies with trypsin or chymotrypsin to create a group of digestion products; (f) performing a mass spectrometry analysis of the digestion products to obtain mass spectrometry data; (g) selecting sequences identified in step c. that correlate with the mass spectrometry data; (h) identifying sequences of CDR3 regions in the sequences from step g.; and (i) selecting from the CDR3 region sequences of step h. those sequences having equal to or more than a required fragmentation coverage percentage; wherein the selected sequences of step (i) comprise a group having the reduced number of false positive CDR3 sequences. In some embodiments, step (d) comprises obtaining plasma from the blood sample and isolating nanobodies using one or more affinity isolation methods. In some aspects, the one or more affinity isolation methods of step (d) comprise one or more of protein G sepharose affinity chromatography and protein A sepharose affinity chromatography. In some aspects, step (d) further comprises a functional selection step comprising selecting antigen-specific nanobodies using an antigen-specific affinity chromatography and eluting the antigen-specific nanobodies under varying degrees of stringency thereby creating different nanobody fractions, and performing steps (e) through (i) on each fraction individually and estimating an affinity of each different step (i) CDR3 region sequence for the antigen based on a relative abundance of the CDR3 region sequence in each of the nanobody fractions.

[0006] In some embodiments, a group of complementarity determining region (CDR)2 nanobody amino acid sequences (CDR2 sequences) wherein a reduced number of the CDR2 sequences are false positives as compared to a control, the method comprising: (a) obtaining a blood sample from a camelid immunized with an antigen; (b) using the blood sample to obtain a nanobody cDNA library; (c) identifying the sequence of each cDNA in the library; (d) isolating nanobodies from the same or a second blood sample from the camelid immunized with the antigen; (e) digesting the nanobodies with trypsin or chymotrypsin to create a group of digestion products; (f) performing a mass spectrometry analysis of the digestion products to obtain mass spectrometry data; (g) selecting sequences identified in step c. that correlate with the mass spectrometry data; (h) identifying sequences of CDR2 regions in the sequences from step g.; and (i) selecting from the CDR2 region sequences of step h. those sequences having equal to or more than a required fragmentation coverage percentage; wherein the selected sequences of step (i) comprise a group having the reduced number of false positive CDR2 sequences. In some embodiments, step (d) comprises obtaining plasma from the blood sample and isolating nanobodies using one or more affinity isolation methods. In some aspects, the one or more affinity isolation methods of step (d) comprise one or more of protein G sepharose affinity chromatography and protein A sepharose affinity chromatography. In some aspects, step (d) further comprises a functional selection step comprising selecting antigen-specific nanobodies using an antigen-specific affinity chromatography and eluting the antigen-specific nanobodies under varying degrees of stringency thereby creating different nanobody fractions, and performing steps (e) through (i) on each fraction individually and estimating an affinity of each different step (i) CDR2 region sequence for the antigen based on a relative abundance of the CDR2 region sequence in each of the nanobody fractions.

[0007] In some embodiments, a group of complementarity determining region (CDR)1 nanobody amino acid sequences (CDR1 sequences) wherein a reduced number of the CDR1 sequences are false positives as compared to a control, the method comprising: (a) obtaining a blood sample from a camelid immunized with an antigen; (b) using the blood sample to obtain a nanobody cDNA library; (c) identifying the sequence of each cDNA in the library; (d) isolating nanobodies from the same or a second blood sample from the camelid immunized with the antigen; (e) digesting the nanobodies with trypsin or chymotrypsin to create a group of digestion products; (f) performing a mass spectrometry analysis of the digestion products to obtain mass spectrometry data; (g) selecting sequences identified in step c. that correlate with the mass spectrometry data; (h) identifying sequences of CDR1 regions in the sequences from step g.; and (i) selecting from the CDR1 region sequences of step h. those sequences having equal to or more than a required fragmentation coverage percentage; wherein the selected sequences of step (i) comprise a group having the reduced number of false positive CDR1 sequences. In some embodiments, step (d) comprises obtaining plasma from the blood sample and isolating nanobodies using one or more affinity isolation methods. In some aspects, the one or more affinity isolation methods of step (d) comprise one or more of protein G sepharose affinity chromatography and protein A sepharose affinity chromatography. In some aspects, step (d) further comprises a functional selection step comprising selecting antigen-specific nanobodies using an antigen-specific affinity chromatography and eluting the antigen-specific nanobodies under varying degrees of stringency thereby creating different nanobody fractions, and performing steps (e) through (i) on each fraction individually and estimating an affinity of each different step (i) CDR1 region sequence for the antigen based on a relative abundance of the CDR1 region sequence in each of the nanobody fractions.

[0008] In some embodiments, the antigen-specific affinity chromatography is a resin conjugated to the antigen. In some embodiments, the antigen-specific affinity chromatography is a resin coupled to a protein tag and the antigen. In some embodiments, the antigen-specific affinity chromatography is a resin coupled to a maltose binding protein and the antigen.

[0009] Some aspects further comprise creating a CDR3, CDR2, or CDR1 peptide having a sequence identified in step (i). Some aspects further comprise creating a nanobody comprising a CDR3, CDR2, and/or CDR1 region having a sequence identified in step (i).

[0010] Also included herein is a nanobody comprising an amino acid sequence selected from SEQ ID NOs: 1-2536 and SEQ ID NOs: 2665-2667.

[0011] Further provided herein is a computer-implemented method, comprising: (a) receiving a nanobody peptide sequence; (b) identifying a plurality of complementarity-determining region (CDR) regions of the nanobody peptide sequence, the CDR regions including CDR3, CDR2 and/or CDR1 regions; (c) applying a fragmentation filter to discard one or more false positive CDR3, CDR2 and/or CDR1 regions of the nanobody peptide sequence; (d) quantifying an abundance of one or more non-discarded CDR3, CDR2 and/or CDR1 regions of the nanobody peptide sequence; and (e) inferring an antigen affinity based on the quantified abundance of the one or more non-discarded CDR3, CDR2 and/or CDR1 regions of the nanobody peptide sequence.

[0012] In some embodiments, the computer-implemented method further comprises classifying the one or more non-discarded CDR3, CDR2 and/or CDR1 regions of the nanobody peptide sequence as having a low antigen affinity, mediocre antigen affinity, or high antigen affinity.

[0013] In some embodiments, the computer-implemented method further comprises assembling the one or more non-discarded CDR3, CDR2 and/or CDR1 regions of the nanobody peptide sequence classified as having the high antigen affinity into a nanobody protein.

[0014] In some aspects of the computer-implemented method, the fragmentation filter is configured to require a minimum calculated fragmentation coverage percentage. In other or further aspects, the minimum calculated fragmentation coverage percentage is about 30. In some aspects, the minimum calculated fragmentation coverage percentage is about 50 for trypsin-treated samples and about 40 for chymotrypsin-treated samples.

[0015] In some embodiments, the computer-implemented method further comprises receiving a plurality of nanobody peptide sequences; and comparing each of the nanobody peptide sequences to a database to separate the nanobody peptide sequences into an excluded subgroup and a non-excluded subgroup, wherein the nanobody peptide sequences of the excluded subgroup are not found in the database, and wherein the CDR regions are only identified in the nanobody peptide sequences of the non-excluded subgroup.

[0016] In some embodiments of the computer-implemented method, the abundance of one or more non-discarded CDR3, CDR2 and/or CDR1 regions of the nanobody peptide sequence is quantified based on relative MS1 ion signal intensities. In some embodiments, the antigen affinity is inferred using k-means clustering based on epitope similarity.

[0017] Also provided herein is a method for training a deep learning model, comprising: creating a dataset using the computer-implemented method described above; and training, using the dataset, a deep learning model to classify nanobody peptide sequences having low antigen affinity and nanobody peptide sequences having high antigen affinity, wherein the dataset comprises a plurality of nanobody peptide sequences and corresponding antigen-affinity labels. In some embodiments, the deep learning model is a convolutional neural network.

[0018] Further provided herein is a method for determining antigen affinity of nanobody peptide sequences, comprising: receiving a nanobody peptide sequence; inputting the nanobody peptide sequence into a trained deep learning model; and classifying, using the trained deep learning model, the nanobody peptide sequence as having low antigen affinity or high antigen affinity. In some embodiments, the deep learning model is a convolutional neural network. In some embodiments, the trained deep learning model is trained according to method for training a deep learning model described above

### DESCRIPTION OF DRAWINGS

[0019] FIG. 1(A-K). In-silico analysis of a NGS Nb database reveals the superiority of chymotrypsin for Nb proteomics. (A) A Nb crystal structure (PDB: 4QGY). CDR loops are color coded. (B) Sequence length distributions of CDRs of the database. (C) In-silico digestion of the Nb database by two proteases and a cumulative plot of corresponding peptide masses. (D) The length distributions for both trypsin and chymotrypsin digested CDR3 peptides. (E) Complementarity of trypsin and chymotrypsin for Nb mapping based on simulation. 10,000 Nbs with unique CDR3 sequences were randomly selected and in silico digested to produce CDR3 peptides. Peptides with molecular weights of 0.8-3 kDa and with sufficient CDR3 coverage (>30%) were used for Nb mapping. (F-G) Evaluations of unique CDR3 peptide identifications (1F: trypsin; 1G: chymotrypsin) based on the percentage of CDR3 fragment ions that were matched in the MS/MS spectra. CDR3 peptides were identified by database search using either the “target” database (in salmon) or the “decoy” database (in grey). (H-K) 3D plots of the normalized CDR3 peptide identifications from the target database search, the percentages of CDR3 fragmentations, and CDR3 length. FDR: false discovery rate. FDRs of CDR3 identifications are colored on the 3D plots. The color bar shows the scale of FDR. FDR below 5% are presented in gradient red. (1H: analysis by trypsin; 1I: analysis by chymotrypsin.) (J-L). Representative high-quality MS/MS spectra of trypsin and chymotrypsin-digested CDR3 peptides. The sequence in FIG. 1K is NTVYLEMNSLKPEDTAVYSCAAGVSDYGCYR (SEQ ID NO: 2656). The sequence in FIG. 1L is YCAAAEGLASGSY (SEQ ID NO: 2657).

[0020] FIG. 2(A-G). Schematics of the hybrid proteomic pipeline for reliable and in-depth analysis of antigen-engaged Nb proteomes. (A) Schematic of the pipeline for Nb proteomics. The pipeline consists of three main components: camelid immunization and purification of antigen-specific Nbs, proteomic analysis of Nbs (facilitated by a dedicated software Augur Llama and deep-learning), and high-throughput integrative structural analysis of antigen-Nb complexes. (B) ELISA measurements of the camelid immune responses of three antigens of GST, HSA and the PDZ. (C) Identifications of unique CDR combinations and unique CDR3 sequences for different antigens. (D) A comparison between trypsin and chymotrypsin for CDR3 mapping of high-quality Nb_{GST}. (E) Comparisons of Nb_{GST} CDR3 identifications by three different proteases (gluC, trypsin and chymotrypsin). The results were based on three independent experiments. (F) The solubility of the randomly selected antigen-specific Nbs. (G) Verifications of the selected Nbs for antigen binding.

[0021] FIG. 3(A-L). Classification of Nb repertoires for GST, HSA and PDZ binding. (A) Label-free MS quantification and heat map analysis of CDR3_{GST} fingerprints by chymotrypsin. (B) Reproducibility and precision of label-free CDR3_{GST} peptide quantifications by chymotrypsin. (C) Percentages of different Nb affinity clusters that were classified by quantitative proteomics. (D) Linear Correlation (R²=0.85) of Nb ELISA affinities (LogIC50 of O.D. 450 nm) with SPR K_{D} measurements. (E) Boxplots of ELISA affinities of different Nb clusters. The p values were calculated based on the student's t test. * indicates a p value of <0.05, ** indicates <0.01, *** indicates <0.001, **** indicates <0.0001, ns indicates not significant. (F) A plot summarizing ELISA affinities of 25 Nb_{HSA} (circles), O.D. at 450 nm. K_{D} affinities of the top 14 ranked Nbs by ELISA were measured by SPR (triangles). (G) A plot summarizing the ELISA affinities of 11 soluble Nb_{PDZ}. (H) SPR kinetics analysis of representative Nb_{GST} from three different affinity clusters. For G60(C1), Ka(1/Ms)=4.9e3, Kd(1/s)=5.9e-3, K_{D}=1.3 μM; for G95(C2), Ka(1/Ms)=1.4e4, Kd(1/s)=1.1e-3, K_{D}=77 nM; For G13(C3), Ka(1/Ms)=4.74e5, Kd(1/s)=1.7e-4, K_{D}=360 pM. (I) A representative SPR kinetics measurements of high-affinity Nb_{HSA}. For H14, Ka(1/Ms)=2.5e5, Kd(1/s)=5.75e-6, K_{D}=22.3 pM. (J) The SPR kinetics measurement of Nb_{PDZ} P10. For P10, Ka(1/Ms)=2.06e6, Kd(1/s)=9.03e-6, K_{D}=4.4 pM. (K) Immunoprecipitations of GST (1 nM) by different Nbs-coupled dynabeads and GSH resin. (L) Schematic of the PDZ domain of the mammalian mitochondrial outer membrane protein 25. Fluorescence microscopic analysis of Nb_{PDZ} P10. The Nb was conjugated by Alexa Fluor 647 for native mitochondrial immunostaining of the COS-7 cell line. Mitotracker was used for positive control.

[0022] FIG. 4(A-K). The structural landscapes of HSA-specific Nb proteomes revealed by the integrative structural methods. (A) The sequence variations of pI and hydropathy between human and camelid serum albumins (upper panel,). The heatmap of the major epitopes mapped by structural docking (lower panel). (B) Cartoon representations of the four dominant HSA epitopes. HSA are presented in gray. E1, E2 and E3 are in salmon, orange and cyan, respectively. (C) Surface representations showing co-localizations of electrostatic potential surfaces with three major epitopes. (D) The HSA epitopes and their fractions (%) based on converged cross-link models (E1: residues 57-62, 135-169; E2: 322-331, 335, 356-365, 395-410; E3: 29-37, 86-91, 117-123, 252-290; E4: 566-585, 595, 598-606 and E5:188-208, 300-306, 463-468). (E-G) Representative cross-link models of HSA-Nb complexes. The best scoring models were presented. Satisfied DSS or EDC cross-links are shown as blue sticks. (H) A putative salt bridge between glutamic acid 400 (HSA) and arginine 108 of a Nb CDR3 is presented. The local sequence alignment between HSA and camelid albumin is shown. (I) ELISA affinity screening (heatmap) of 19 different Nbs for binding to wild type HSA and the point mutant (E400R). * indicates decreased affinity. (J) A plot of the RMSDs (room-median-square-deviations) of HSA-Nb cross-link models. (K) Bar plots showing the percentage of all the DSS and EDC cross-links of HSA-Nbs that satisfied the models.

[0023] FIG. 5(A-K). Mechanisms of Nb affinity maturation. (A) Distributions of CDR3 lengths of high-affinity (dark) and low-affinity (light) Nb_{GST} and Nb_{HSA} (B) Comparisons of the pI of different Nbs. (C-D) Comparisons of pI and hydropathy of CDRs between different Nbs. (E) A plot of CDR3 sequences. The alignment is based on a random selection of 1,000 unique CDR3 sequences with the identical length of 15 residues. Schematic of CDR3 architecture: the hypervariable “head” is in dark grey and the semi-variable “torso” is in pale grey. (F) Pie charts of the amino acid compositions of the CDR3 heads (Nb_{GST} and Nb_{HSA}) and the CDR2s (Nb_{GST}) Only the top 6 abundant residues are shown. (G) The relative changes of abundant amino acids on CDR3 heads of both Nb_{GST} and Nb_{HSA}. Positive charged residues of K(lysine)/R(arginine)/H(histidine), negative charged residues of D(aspartic acid)/E(glutamic acid), aromatic residue of Y(tyrosine) and small flexible amino acids of G(glycine)/S(serine) are shown. (H) Comparisons of the relative abundance of Y, G and S on the CDR3 heads between high-affinity and low-affinity Nb_{HSA}. Their relative abundances are plotted as a function of the relative position of the respective residues. A representative structure (PDB: 5F1O) of antigen-Nb complex showing two tyrosines on the CDR3 head are inserted into the deep pockets of the antigen. (I) Correlation plots of the ELISA affinities and the number of specific amino acids on the CDR3 heads of Nb_{HSA}. Pearson correlation coefficients and the statistical values are shown. (J) The correlation plot of ELISA affinities and the number of positively charged residues on the CDR2s of Nb_{GST}. (K) Sequence logo of two representative convolutional CDR3 filters (Filter 14 for high-affinity Nb_{HSA}; filter 3 for low-affinity Nb_{HSA}) learned by a deep learning model. The sequence of the top panel of FIG. 5K is SEQ ID NO: 2661 (YXXXXXX, residue 2 can be Y, L, D, R, or I; residue 3 can be K or G; residue 4 can be R, Y, T, or D; residue 5 can be P, D, or R, residue 6 can be E, Y, V, P, W or D; residue 7 can be G, W, D, or P). The sequence of the bottom panel of FIG. 5K is SEQ ID NO: 2662 (YXXXLXX, residue 2 can be D, P, K, or A; residue 3 can be F, P, D, or A; residue 4 can be H, T, or G, residue 6 can be G, N; residue 7 can be R, P, D, or Y.

[0024] FIG. 6(A-H): The outstanding versatility of Nbs for antigen binding. (A) The electrostatic potential surface and the dominant E2 epitope of PDZ domain (PDB: 2JIK; E1: 7-8, 35-36, 43, 99-100, and E2: 25-26, 45-46, 48, 78-79, 82-83, 85-86). (B) A docking model by a long CDR3 (in deep salmon) of a high-affinity Nb_{PDZ}P10. (C) Comparison between a crystal structure of PDZ-peptide ligand complex (PDB:1EB9) and a docking model of PDZ-Nb complex. The conserved ligand binding sites are shown in cyan. Side chains of both CDR3 and the peptide ligand are shown. (D) A heatmap showing the ELISA affinities of 11 different Nbs for binding to wild type or a mutant (R46E: K48D) PDZ. * indicates a decrease of 10-100,000 fold ELISA affinity. (E) Plot comparisons of both the CDR3 lengths (upper panel) and pIs (lower panel) of different Nbs (high-affinity Nb_{HSA}, Nb_{GST}, Nb_{PDZ} and Nbs from the sequence database). The data was smoothed with a gaussian function. (F) Comparisons of pI and hydropathy among different Nbs. (G) Pie charts of the top 6 most abundant amino acids on the Nb CDR3 heads. (H) A schematic model for antigen binding by Nbs.

[0025] FIG. 7(A-F). Analysis of NGS Nb databases and representative false positive CDR3 peptide identifications. (A) The normalized variability of Nb sequences. Approximately 0.5 million unique Nb sequences were aligned based on IMGT numbering scheme to generate the plot. Amino acids were grouped based on their properties (i.e., positive, negative, polar, and nonpolar) and were color-coded. (B) The mass distribution of ˜1.5 million peptide identifications of human proteins from PeptideAtlas. (C) In silico digestion of Nb NGS database by different proteases (AspN, GluC, LysC, Trypsin and Chymotrypsin) and plot of peptide masses. (D) The overlaps between the target Nb sequence database of the immunized Llama and a decoy database from another native Llama. ˜0.5 million sequences were included in each database. (E) A representative low quality/false positive MS/MS spectrum (HCD) of a tryptic CDR3 peptide. (F) That of a chymotryptic CDR3 peptide. Few high-resolution fragment ions were matched in the spectra. The sequences in FIG. 7E are NTVYLQMNSLKPE (SEQ ID NO: 2658) and DTSIYYCAATPVFQSMSTMATESVYDYWGQGTQVTVSSEPK (SEQ ID NO: 2659). The sequence in FIG. 7F is CAAGSGVGLY (SEQ ID NO: 2660).

[0026] FIG. 8(A-J). The informatics pipeline of “Augur Llama” for Nb proteomics and validation of Nb binders. (A) Schematics of the informatic pipeline. Three modules including 1) peptide identifications, 2) Nb peptide and protein quality control, and 3) quantification and classifications were presented. Nb proteomics data is first searched against the search engine. The initial identifications that pass the search engine can be automatically annotated, and evaluated based on different quality filters at peptide and protein levels. High-quality fingerprint peptides that pass the quality filters can be quantified and clustered. (B) Illustrations of the Nb CDR3 spectrum and coverage quality filters. (C) Illustrations of peptide classification method. (D) Phylogenetic tree and Web logo analyses of 230 unique CDR3s of the identified Nb_{PDZ}. (E) Schematic of PCR amplifications of HcAb variable domain (VHH) from B lymphocytes of the camelid. (F) DNA gel electrophoresis of the VHH PCR amplicons from the cDNA libraries prepared from the immunized bone marrow/blood. (G) SDS-PAGE analysis of fractionated Nb_{GST} based on different fractionation protocols. (H) SDS-PAGE analysis of Nb_{PDZ}. Maltose-binding protein (MBP) tag was fused to PDZ domain and the fusion protein was used as affinity handle for isolation. MBP was used as a negative control for quantification. (I) Unique Nb identifications for different antigens. (J) Comparison of antigen-specific Nbs identified by either chymotrypsin or trypsin-based method. Y axis stands for the % of the positive hits that were randomly selected for verifications.

[0027] FIG. 9(A-D). Proteomic quantifications, biochemical verifications and affinity measurements of Nb_{GST}. (A) Proteomic quantifications and heatmap analysis of Nb_{GST} based on different fractionation methods. (B) Pearson correlations of LC retention times of different fractionated Nb peptide samples. (C) Representative GST beads-binding assay. GST coupled resin was used to specifically isolate recombinant Nb from the E. coli lysis. Red arrows indicate enriched Nbs. Inactivated resin was used for negative control. (D) SPR kinetic measurements of 10 representative Nb_{GST}.

[0028] FIG. 10(A-B). Characterizations of High-quality HSA and PDZ Nbs. (A) SPR kinetic measurements of representative high-affinity Nb_{HSA}. (B) Beads-binding assays of selected high-quality Nb_{PDZ}. Recombinant MBP fusion PDZ was used as an affinity handle for isolation of Nbs from E. coli lysates. MBP coupled resin was used for negative control. I: E. coli lysate input, B: beads control, P: affinity pullout by PDZ.

[0029] FIG. 11(A-G). Hybrid structural analysis of GST-Nb complexes. (A) Heatmap analysis of structural docking of 64,670 GST-Nb complexes showing three converged epitopes (E1: 75-88, 143-148; E2: 33-43, 107-127; E3: 158-200, 213-220). (B) Cartoon representations of the three dominant GST epitopes. GST dimers were presented in gray. E1, E2 and E3 were in pale yellow, orange, and deep teal respectively. (C) Surface representations showing colocalizations of electrostatic surfaces with three major epitopes. (D) GST epitopes and their abundances (%) based on converged cross-link models were shown with different colors.

[0030] FIG. 12(A-H). The analysis of the CDR sequences of different Nbs and the sequence conservation of camelid and human albumin. (A-B) Comparison of the abundance of amino acids on the CDR3 heads between high-affinity and low-affinity Nbs. (C-F) Comparison of CDR1 and CDR2 for different Nbs. (G) Comparison of the relative position of tyrosine (Y), glycine(G) and serine(S) on the CDR3 heads of GST Nbs. (H) Sequence alignment of human serum albumin and llama serum albumin. Conserved amino acids were highlighted.

[0031] FIG. 13(A-F). Comparison among different antigen epitopes. (A) Comparison of the geometries of a major epitope of three different antigens (i.e., E2 for PDZ, E3 for GST dimer and E3 for HSA). Different epitopes were color coded on the antigen structures. (B) The surface electrostatic potentials and the E1 epitope of the PDZ domain. (C) A plot of the solvent accessible areas of different epitopes. The y axis stands for the areas of different epitopes in square angstrom. (D) Net formal charges of the epitopes. (E) Relative abundance of different amino acids on the CDR3 heads. DB: NGS Nb sequence database. (F) Comparison of the pI of CDR1 and CDR2 among different antigen-specific Nbs.

[0032] FIG. 14 depicts an example of a computing system that executes methods and procedures described in certain embodiments of the present disclosure.

[0033] FIG. 15(A-B) shows the results of amino acid sequence filters that are derived from the deep learning approach. The sequence filters can be used to accurately separate high-affinity from low-affinity binding HSA Nbs. The sequence of FIG. 15A is SEQ ID NO: 2663 (LXYRXXX, residue 2 can be N, Y, V, or G; residue 5 can be L or W; residue 6 can be E, G, N, T, or S; residue 7 can be D or E). The sequence of FIG. 15B is SEQ ID NO: 2664 (XXXXXXX, residue 1 can be C, F, Q, S, H, K, L, Y, or R; residue 2 can be G, P, A, or N; residue 3 can be E, S, G, T, P, V, Y, H, or A; residue 4 can be C, A, S, P, or D; residue 5 can be I, W, V, T, or A; residue 6 can be M, Q, or H; residue 7 can be K, Y, Q, V, or W).

[0034] FIG. 16(A-C) shows the results of amino acid sequence filters that are derived from the deep learning approach. The sequence filters can be used to accurately separate high-affinity from low-affinity binding HSA Nbs. The sequence of FIG. 16A is SEQ ID NO: 2665 (TXXXLXX; residue 2 can be D, P, K, or A; residue 3 can be F, P, L, D, or A; residue 4 can be H, T, or G; residue 6 can be G, E, N, or R; residue 7 can be R, P, G, D, or Y). The sequence of FIG. 16B is SEQ ID NO: 2666 (XXRXXXX; residue 1 can be E, G, W, D, or I; residue 2 can be N, G, or C; residue 4 can be A, H, or D; residue 5 can be E, R, Y, A, or T; residue 6 can be G, A, or P; residue 7 can be L, S, or Y). The sequence of FIG. 16C is SEQ ID NO: 2667 (XXGAQXW; residue 1 can be R or A; residue 2 can be K or L; residue 6 can be L, G, Y, or W).

### DETAILED DESCRIPTION

[0035] Here reported is an integrative proteomic platform for in-depth discovery, classification, and high-throughput structural characterization of antigen-engaged Nb repertoires. The sensitivity and robustness of the technologies were validated using antigens spanning three orders of magnitude in immune response including a small, weakly immunogenic antigen derived from mitochondrial membrane. Tens of thousands of highly diverse, specific Nb families were confidently identified and quantified according to their physicochemical properties; a significant fraction had sub-nM affinity. Using high-throughput structural modeling, structural proteomics, and deep learning, the structural landscapes of >100,000 antigen-Nb complexes were systematically surveyed to significantly advance the understanding of immunogenicity and Nb affinity maturation. The study has revealed a surprising efficiency, specificity, diversity, and versatility of the mammalian humoral immune system.

### Terminology

[0036] As used in the specification and claims, the singular form “a,” “an,” and “the” include plural references unless the context clearly dictates otherwise. For example, the term “a cell” includes a plurality of cells, including mixtures thereof.

[0037] The term “about” as used herein when referring to a measurable value such as an amount, a percentage, and the like, is meant to encompass variations of ±20%, ±10%, ±5%, or ±1% from the measurable value.

[0038] “Administration” to a subject or “administering” includes any route of introducing or delivering to a subject an agent. Administration can be carried out by any suitable route, including oral, intravenous, intraperitoneal, intranasal, inhalation and the like. Administration includes self-administration and the administration by another.

[0039] The terms “antibody” and “antibodies” are used herein in a broad sense and include polyclonal antibodies, monoclonal antibodies, and bi-specific antibodies. In addition to intact immunoglobulin molecules, also included in the term “antibodies” are fragments or polymers of those immunoglobulin molecules, and human or humanized versions of immunoglobulin molecules or fragments thereof. Antibodies are usually heterotetrameric glycoproteins of about 150,000 daltons, composed of two identical light (L) chains and two identical heavy (H) chains. Each heavy chain has at one end a variable domain (V_{H}) followed by a number of constant domains. Each light chain has a variable domain at one end (V_{L}) and a constant domain at its other end.

[0040] As used herein, the terms “antigen” or “immunogen” are used interchangeably to refer to a substance, typically a protein, a nucleic acid, a polysaccharide, a toxin, or a lipid, which is capable of inducing an immune response in a subject. The term also refers to proteins that are immunologically active in the sense that once administered to a subject (either directly or by administering to the subject a nucleotide sequence or vector that encodes the protein) is able to evoke an immune response of the humoral and/or cellular type directed against that protein.

[0041] The terms “antigenic determinant” and “epitope” may also be used interchangeably herein, referring to the location on the antigen or target recognized by the antigen-binding molecule (such as the nanobodies of the invention). Epitopes can be formed both from contiguous amino acids (a “linear epitope”) or noncontiguous amino acids juxtaposed by tertiary folding of a protein. The latter epitope, one created by at least some noncontiguous amino acids, is described herein as a “conformational epitope.” An epitope typically includes at least 3, and more usually, at least 5 or 8-10 amino acids in a unique spatial conformation. Methods of determining spatial conformation of epitopes include, for example, x-ray crystallography and 2-dimensional nuclear magnetic resonance. See, e.g., Epitope Mapping Protocols in Methods in Molecular Biology, Vol. 66, Glenn E. Morris, Ed (1996).

[0042] The terms “antigen binding site”, “binding site” and “binding domain” refer to the specific elements, parts or amino acid residues of a polypeptide, such as a nanobody, that bind the antigenic determinant or epitope.

[0043] The term “biological sample” as used herein means a sample of biological tissue or fluid. Such samples include, but are not limited to, tissue isolated from animals. Biological samples can also include sections of tissues such as biopsy and autopsy samples, frozen sections taken for histologic purposes, blood, plasma, serum, sputum, stool, tears, mucus, hair, and skin. Biological samples also include explants and primary and/or transformed cell cultures derived from patient tissues. A biological sample can be provided by removing a sample of cells from an animal, but can also be accomplished by using previously isolated cells (e.g., isolated by another person, at another time, and/or for another purpose), or by performing the methods as disclosed herein in vivo. Archival tissues, such as those having treatment or outcome history can also be used.

[0044] The term “cDNA library” refers herein to a combination of different cDNA fragments, which constitute some portion of the transcriptome of a given organism.

[0045] The terms “CDR” and “complementarity determining region” are used interchangeably and refer to a part of the variable chain of an antibody that participates in binding to an antigen. Accordingly, a CDR is a part of, or is, an “antigen binding site.” In some embodiments, the nanobody comprises three CDR that collectively form an antigen binding site.

[0046] The term “comprising” and variations thereof as used herein is used synonymously with the term “including” and variations thereof and are open, non-limiting terms. Although the terms “comprising” and “including” have been used herein to describe various embodiments, the terms “consisting essentially of” and “consisting of” can be used in place of “comprising” and “including” to provide for more specific embodiments and are also disclosed.

[0047] “Composition” refers to any agent that has a beneficial biological effect. Beneficial biological effects include both therapeutic effects, e.g., treatment of a disorder or other undesirable physiological condition, and prophylactic effects, e.g., prevention of a disorder or other undesirable physiological condition. The terms also encompass pharmaceutically acceptable, pharmacologically active derivatives of beneficial agents specifically mentioned herein, including, but not limited to, a bacterium, a vector, polynucleotide, cells, salts, esters, amides, proagents, active metabolites, isomers, fragments, analogs, and the like. When the terms “composition” is used, then, or when a particular composition is specifically identified, it is to be understood that the term includes the composition per se as well as pharmaceutically acceptable, pharmacologically active vector, polynucleotide, salts, esters, amides, proagents, conjugates, active metabolites, isomers, fragments, analogs, etc.

[0048] A “control” is an alternative subject or sample used in an experiment for comparison purposes. A control can be “positive” or “negative.”

[0049] “Effective amount” encompasses, without limitation, an amount that can ameliorate, reverse, mitigate, prevent, or diagnose a symptom or sign of a medical condition or disorder (e.g., cancer). Unless dictated otherwise, explicitly or by context, an “effective amount” is not limited to a minimal amount sufficient to ameliorate a condition. The severity of a disease or disorder, as well as the ability of a treatment to prevent, treat, or mitigate, the disease or disorder can be measured, without implying any limitation, by a biomarker or by a clinical parameter. In some embodiments, the term “effective amount of a recombinant nanobody” refers to an amount of a recombinant nanobody sufficient to prevent, treat, or mitigate a cancer.

[0050] The “fragments” or “functional fragments,” whether attached to other sequences or not, can include insertions, deletions, substitutions, or other selected modifications of particular regions or specific amino acids residues, provided the activity of the fragment is not significantly altered or impaired compared to the nonmodified peptide or protein. These modifications can provide for some additional property, such as to remove or add amino acids capable of disulfide bonding, to increase its bio-longevity, to alter its secretory characteristics, etc. In any case, the functional fragment must possess a bioactive property, such as binding to HSA and/or ameliorating cancer.

[0051] The term “fragmentation coverage percentage” refers to a percentage obtained using the following formula:

[0052] f(x,Enzyme) is the function to calculate fragmentation coverage (%) of peptides digested by Enzyme

[0053] x is the length of CDR3 that the peptide mapped

f(x,chymotrypsin)=0.0023x²−0.0497x+0.7723,x[5,30]

f(x,trypsin)=0.00006x²−0.00444x+0.9194,x[5,30].

[0054] In some embodiments, a minimum calculated fragmentation coverage percentage is required. In other or further aspects, the required minimum calculated fragmentation coverage percentage is about 30. In some aspects, the required minimum calculated fragmentation coverage percentage is about 50 when trypsin is the enzyme and about 40 when chymotrypsin is the enzyme.

[0055] As used herein, a “functional selection step” is a method by which nanobodies are divided into different fractions or groups based upon a functional characteristic. In some embodiments, the functional characteristic is nanobody or CD3, CD2, or CD1 region antigen affinity. In other embodiments, the functional characteristic is nanobody thermostability. In other embodiments, the functional characteristic is nanobody intracellular penetration. Accordingly, the present invention includes a method of identifying a group of complementarity determining region (CDR)3, 2 or 1 region nanobody amino acid sequences (CDR3, CDR2 or CDR1 sequences) wherein a reduced number of the CDR3, CDR2 or CDR1 sequences are false positives as compared to a control, the method comprising: obtaining a blood sample from a camelid immunized with the antigen; using the blood sample to obtain a nanobody cDNA library; identifying the sequence of each cDNA in the library; isolating nanobodies from the same or a second blood sample from the camelid immunized with the antigen; performing a functional selection step; digesting the nanobodies with trypsin or chymotrypsin to create a group of digestion products; performing a mass spectrometry analysis of the digestion products to obtain mass spectrometry data; selecting sequences identified in step c. that correlate with the mass spectrometry data; identifying sequences of CDR3, CDR2 or CDR1 regions in the sequences from step g.; and excluding from the CDR3, CDR2 or CDR1 region sequences from step h. those sequences having less than a calculated fragmentation coverage percentage; wherein the non-excluded sequences comprise a group having the reduced number of false positive CDR3, CDR2 or CDR1 sequences. It should be understood that the method steps following the functional selection step can be performed separately on each different fraction or group created by the functional selection.

[0056] The “half-life” of an amino acid sequence, compound or polypeptide of the invention can generally be defined as the time taken for the serum concentration of the amino acid sequence, compound or polypeptide to be reduced by 50%, in vivo, for example due to degradation of the sequence or compound and/or clearance or sequestration of the sequence or compound by natural mechanisms. The in vivo half-life of a nanobody, amino acid sequence, compound or polypeptide of the invention can be determined in any manner known, such as by pharmacokinetic analysis. these, for example, Kenneth, A et al., Chemical Stability of Pharmaceuticals: A Handbook for Pharmacists; Peters et al., Pharmacokinete analysis: A Practical Approach (1996); “Pharmacokinetics”, M Gibaldi & D Perron, published by Marcel Dekker, 2nd Rev. edition (1982).

[0057] The term “identity” or “homology” shall be construed to mean the percentage of nucleotide bases or amino acid residues in the candidate sequence that are identical with the bases or residues of a corresponding sequence to which it is compared, after aligning the sequences and introducing gaps, if necessary to achieve the maximum percent identity for the entire sequence, and not considering any conservative substitutions as part of the sequence identity. A polynucleotide or polynucleotide region (or a polypeptide or polypeptide region) that has a certain percentage (for example, 61%, 62%, 63%, 64%, 65%, 66%, 67%, 68%, 69%, 70%, 71%, 72%, 73%, 74%, 75%, 76%, 77%, 78%, 79%, 80%, 81%, 82%, 83%, 84%, 85%, 86%, 87%, 88%, 89%, 90%, 91%, 92%, 93%, 94%, 95%, 96%, 97%, 98%, 99% or higher) of “sequence identity” to another sequence means that, when aligned, that percentage of bases (or amino acids) are the same in comparing the two sequences. This alignment and the percent homology or sequence identity can be determined using software programs known in the art. Such alignment can be provided using, for instance, the method of Needleman et al. (1970) J. Mol. Biol. 48: 443-453, implemented conveniently by computer programs such as the Align program (DNAstar, Inc.). In some embodiments, percent identity is determined along the entire length of the compared sequences.

[0058] The term “increased” or “increase” as used herein generally means an increase by a statically significant amount; for the avoidance of any doubt, “increased” means an increase of at least 10% as compared to a reference level, for example an increase of at least about 20%, or at least about 30%, or at least about 40%, or at least about 50%, or at least about 60%, or at least about 70%, or at least about 80%, or at least about 90% or up to and including a 100% increase or any increase between 10-100% as compared to a reference level, or at least about a 2-fold, or at least about a 3-fold, or at least about a 4-fold, or at least about a 5-fold or at least about a 10-fold increase, or any increase between 2-fold and 10-fold or greater as compared to a reference level.

[0059] The term “isolating” as used herein refers to isolation from a biological sample, i.e., blood, plasma, tissues, exosomes, or cells. As used herein the term “isolated,” when used in the context of, e.g., a nucleic acid, refers to a nucleic acid of interest that is at least 60% free, at least 75% free, at least 90% free, at least 95% free, at least 98% free, and even at least 99% free from other components with which the nucleic acid is associated with prior to isolation.

[0060] The term “mass spectrometry” refers to a measurement of the mass-to-charge ratio (m/z) of one or more molecules present in a sample. “Mass spectrometry data” refers to mass, charge, mass-to-charge ratio, molecular weight and/or amino acid identity or sequence of the one or more molecules present in a sample. In some embodiments, the mass spectrometry data is the amino acid sequence of a molecule present in the sample. Sequences, including cDNA sequences, that “correlate” with mass spectrometry data have an expected same or highly similar amino acid sequence determined in the mass spectrometry step of the method. In some embodiments, a sequence correlates with mass spectrometry data when there is about 80%, about 85%, about 90%, about 91%, about 92%, about 93%, about 94%, about 95%, about 96%, about 97%, about 98%, or about 99% similarity or identity. In some embodiments, a sequence correlates with mass spectrometry data when there is about 90-100% similarity or identity.

[0061] As used herein, the terms “nanobody”, “V_{H}H”, “V_{H}H antibody fragment” are used indifferently and designate a variable domain of a single heavy chain of an antibody of the type found in Camelidae, which are without any light chains, such as those derived from Camelids as described in PCT Publication No. WO 94/04678, which is incorporated by reference in its entirety. As used herein, “single domain antibody” refers to a nanobody and an Fc domain.

[0062] The term “nucleic acid” as used herein means a polymer composed of nucleotides, e.g. deoxyribonucleotides (DNA) or ribonucleotides (RNA). The terms “ribonucleic acid” and “RNA” as used herein mean a polymer composed of ribonucleotides. The terms “deoxyribonucleic acid” and “DNA” as used herein mean a polymer composed of deoxyribonucleotides.

[0063] As used herein, “operatively linked” refers to the arrangement of polypeptide segments within a single polypeptide chain, where the individual polypeptide segments can be, without limitation, a protein, fragments thereof, linking peptides, and/or signal peptides. The term operatively linked can refer to direct fusion of different individual polypeptides within the single polypeptides or fragments thereof where there are no intervening amino acids between the different segments as well as when the individual polypeptides are connected to one another via a “linker” that comprises one or more intervening amino acids.

[0064] The term “reduced”, “reduce”, “reduction”, or “decrease” as used herein generally means a decrease by a statistically significant amount. However, for avoidance of doubt, “reduced” means a decrease by at least 5% as compared to a reference level, for example a decrease by at least about 10%, or at least about 20%, or at least about 30%, or at least about 40%, or at least about 50%, or at least about 60%, or at least about 70%, or at least about 80%, or at least about 90% or up to and including a 100% decrease (i.e., absent level as compared to a reference sample), or any decrease between 10-100% as compared to a reference level.

[0065] The terms “polynucleotide” and “oligonucleotide” are used interchangeably, and refer to a polymeric form of nucleotides of any length, either deoxyribonucleotides or ribonucleotides, or analogs thereof. Polynucleotides may have any three-dimensional structure, and may perform any function, known or unknown. The following are non-limiting examples of polynucleotides: a gene or gene fragment, exons, introns, messenger RNA (mRNA), transfer RNA, ribosomal RNA, ribozymes, cDNA, recombinant polynucleotides, branched polynucleotides, plasmids, vectors, isolated DNA of any sequence, isolated RNA of any sequence, nucleic acid probes, and primers. A polynucleotide may comprise modified nucleotides, such as methylated nucleotides and nucleotide analogs. If present, modifications to the nucleotide structure may be imparted before or after assembly of the polymer. The sequence of nucleotides may be interrupted by non-nucleotide components. A polynucleotide may be further modified after polymerization, such as by conjugation with a labeling component. The term also refers to both double- and single-stranded molecules. Unless otherwise specified or required, any embodiment of this invention that is a polynucleotide encompasses both the double-stranded form and each of two complementary single-stranded forms known or predicted to make up the double-stranded form.

[0066] The term “polypeptide” is used in its broadest sense to refer to a compound of two or more subunit amino acids, amino acid analogs, or peptidomimetics. The subunits may be linked by peptide bonds. In another embodiment, the subunit may be linked by other bonds, e.g. ester, ether, etc. As used herein the term “amino acid” refers to either natural and/or unnatural or synthetic amino acids, including glycine and both the D or L optical isomers, and amino acid analogs and peptidomimetics. A peptide of three or more amino acids is commonly called an oligopeptide if the peptide chain is short. If the peptide chain is long, the peptide is commonly called a polypeptide or a protein. The terms “peptide,” “protein,” and “polypeptide” are used interchangeably herein.

[0067] “Recombinant” used in reference to a polypeptide refers herein to a combination of two or more polypeptides, which combination is not naturally occurring.

[0068] The term “specificity” refers to the number of different types of antigens or antigenic determinants to which a particular antigen-binding molecule (such as the nanobody of the invention) can bind. A nanobody with low specificity binds to multiple different epitopes (or polypeptide regions) via a single antigen binding site or binding domain, whereas a nanobody with high specificity binds to one or a few epitopes (or polypeptide regions) via a single antigen binding site or binding domain. In some embodiments, the few epitopes (or polypeptide regions) are similar or highly similar, such as, for example, cross-species epitopes. As used herein, the term “specifically binds,” as used herein with respect to a nanobody refers to the nanobody's preferential binding to an epitope (or polypeptide region) as compared with other epitopes (or polypeptide regions). Specific binding can depend upon binding affinity and the stringency of the conditions under which the binding is conducted. In one example, a nanobody specifically binds an epitope when there is high affinity binding under stringent conditions. In some embodiments, the HSA binding polypeptide or nanobody described herein specifically binds to human serum albumin.

[0069] It should be understood that the specificity of an antigen-binding molecule (e.g., the HSA binding polypeptides, the nanoantibodies of the present invention) can be determined based on affinity and/or avidity. The affinity, represented by the equilibrium constant for the dissociation of an antigen with an antigen-binding molecule (K_{D}), is a measure for the binding strength between an antigenic determinant and an antigen-binding site on the antigen-binding molecule: the lesser the value of the K_{D}, the stronger the binding strength between an antigenic determinant and the antigen-binding molecule (alternatively, the affinity can also be expressed as the affinity constant (KA), which is 1/K_{D}). Methods for determining affinity are well known to those of ordinary skill in the art. Avidity is the measure of the strength of binding between an antigen-binding molecule (such as the HSA binding polypeptides and the nanobodies of the present invention) and the pertinent antigen. Avidity is related to both the affinity between an antigenic determinant and its antigen binding site on the antigen-binding molecule and the number of pertinent binding sites present on the antigen-binding molecule. Typically, antigen-binding proteins (such as the HSA binding polypeptides and the nanobodies of the invention) will bind to their antigen with a dissociation constant (K_{D}) of 10⁻⁵ to 10⁻¹² moles/liter or less, and preferably 10⁻⁷ to 10⁻¹² moles/liter or less and more preferably 10⁻⁸ to 10⁻¹² moles/liter (i.e., with an association constant (KA) of 10⁵ to 10¹² liter/moles or more, and preferably 10⁷ to 10¹² liter/moles or more and more preferably 10⁸ to 10¹² liter/moles). In some embodiments, the Ka (on rate, IMs) is about 10⁵, 10⁶, 10⁷, 10⁸, 10⁹, 10¹⁰, or 10¹¹. In some embodiments, the Ka is about 10⁷. In some embodiments, the Kd (off rate, s) is about 10⁻⁵, 10⁻⁶, 10⁻⁷, 10⁻⁸, 10⁻⁹, 10⁻¹⁰, or 10⁻¹¹. In some embodiments, the K_{D} is about 10⁻⁷. In some embodiments, the antigen-binding protein disclosed herein binds to its antigen with a K_{D} of less than about 10⁻⁹ moles/liter. Any K_{D} value greater than 10 μM is generally considered to indicate non-specific binding. The dissociation constant may be the actual or apparent dissociation constant, as will be clear to the person of ordinary skill in the art.

[0070] The term “subject” is defined herein to include animals such as mammals, including, but not limited to, primates (e.g., humans), cows, sheep, goats, horses, dogs, cats, rabbits, rats, mice and the like. In some embodiments, the subject is a human.

### Compositions and Methods

[0071] In some aspects, disclosed herein is a method of identifying a group of complementarity determining region (CDR)3, 2 or 1 region nanobody amino acid sequences (CDR3, CDR2 or CDR1 sequences) wherein a reduced number of the CDR3, CDR2 or CDR1 sequences are false positives as compared to a control. The term “false positive” herein refers to a result that indicates something is present when it is not. Herein the phrase “sequences are false positive” refers to the CDR3, CDR2 and/or CDR1 sequences that do not specifically bind to the tested antigens, or to the CDR3, CDR2 and/or CDR1 sequences contained within a nanobody, which nanobody cannot specifically bind to the tested antigens. It should be understood that the number or amount of false positive CDR3, CDR2 and/or CDR1 sequences can be reduced using the methods disclosed herein with a fragmentation filter set at about at least 30% (for example, at least about 30%, 35%, 40%, 45%, 50%, 55%, 60%, 65%, 70%, 75%, 80%, 85%, 90%, 95%, or 99%) for trypsin-treated samples and/or about at least 30% (for examples, at least about 30%, 35%, 40%, 45%, 50%, 55%, 60%, 65%, 70%, 75%, 80%, 85%, 90%, 95%, or 99%) for chymotrypsin-treated samples. In some examples, the false positive CDR3, CDR2 and/or CDR1 sequences can be mostly removed using the methods disclosed herein with a fragmentation filter set at about 50% for trypsin-treated samples and/or about 40% for chymotrypsin-treated samples.

[0072] Accordingly, the disclosed method of identifying CDR3, CDR2 and/or CDR1 sequences can reduce the number of the CDR3, CDR2 and/or CDR1 sequences that are false positives as compared to a control. The reduction can be, for example, at least about a 2-fold, at least about a 3-fold, at least about a 4-fold, at least about a 5-fold, at least about a 10-fold, at least about a 20-fold, at least about a 50-fold, or at least about a 100-fold compared to the number of false positive CDR3, CDR2 and/or CDR1 sequences that are identified without using the method described herein.

[0073] In some embodiments, the method comprises:
[0074] a. obtaining a blood sample from a camelid immunized with an antigen;
[0075] b. using the blood sample to obtain a nanobody cDNA library;
[0076] c. identifying the sequence of each cDNA in the cDNA library;
[0077] d. isolating nanobodies from the same or a second blood sample from the camelid immunized with the antigen;
[0078] e. digesting the nanobodies with trypsin or chymotrypsin to create a group of digestion products;
[0079] f. performing a mass spectrometry analysis of the digestion products to obtain mass spectrometry data;
[0080] g. selecting sequences identified in step c. that correlate with the mass spectrometry data;
[0081] h. identifying sequences of CDR3, CDR2 and/or CDR1 regions in the sequences from step g.; and
[0082] i. selecting from the CDR3, CDR2 and/or CDR1 region sequences of step h. those sequences having equal to or more than a required fragmentation coverage percentage; wherein the selected sequences comprise a group having the reduced number of false positive CDR3, CDR2 and/or CDR1 sequences.

[0083] In some embodiments, the method comprises:
[0084] a. obtaining a blood sample from a camelid immunized with an antigen;
[0085] b. using the blood sample to obtain a nanobody cDNA library;
[0086] c. identifying the sequence of each cDNA in the library;
[0087] d. isolating nanobodies from the same or a second blood sample from the camelid immunized with the antigen;
[0088] e. digesting the nanobodies with trypsin or chymotrypsin to create a group of digestion products;
[0089] f. performing a mass spectrometry analysis of the digestion products to obtain mass spectrometry data;
[0090] g. selecting sequences identified in step c. that correlate with the mass spectrometry data;
[0091] h. identifying sequences of CDR3, CDR2 and/or CDR1 regions in the sequences from step g.; and
[0092] i. selecting from the CDR3, CDR2 and/or CDR1 region sequences of step h. those sequences having equal to or more than a required fragmentation coverage percentage; wherein the fragmentation coverage percentage is determined by a formula f(x,chymotrypsin)=0.0023x2−0.0497x+0.7723,x[5,30] when chymotrypsin is used in step e. or a formula f(x,trypsin)=0.00006x2−0.00444x+0.9194, x[5,30] when trypsin is used in step e., and wherein x is the length of the CDR3, CDR2 and/or CDR1 region sequence; and
[0093] j. wherein the selected sequences of step i. comprise a group having the reduced number of false positive CDR3, CDR2 and/or CDR1 sequences.

[0094] In some aspects, the selected CDR3, CDR2 and/or CDR1 region sequences in step i. have a minimum required fragmentation coverage percentage of about 30. In some aspects, the selected CDR3, CDR2 and/or CDR1 region sequences in step i. have a minimum required fragmentation coverage percentage of about 50 and trypsin is used in step e. In some embodiments, the selected CDR3, CDR2 and/or CDR1 region sequences in step i. have a minimum required fragmentation coverage percentage about 40 and chymotrypsin is used in step e.

[0095] It should be understood that the nanobody cDNA library in step b. is obtained from a biological sample (e.g., a blood sample or bone marrow) of the immunized subject. In some embodiments, the cDNA library is obtained from the B cells. A cDNA (cloned cDNA or complementary DNA) library is a combination of cDNAs that are produced from mRNAs in a biological sample (e.g., a blood sample or bone marrow sample) using reverse transcription technology. The method of producing cDNA library is well-known in the art. Accordingly, in some embodiments, step b. further comprises a step of isolating mRNAs from a biological sample (e.g., a blood sample or a bone marrow sample) and/or a step of reverse transcribing the isolated mRNA to cDNAs.

[0096] The produced cDNAs are then sequenced as described in step c. In some embodiments, step c. further comprises a step of amplifying camelid IgG heavy chain cDNA sequences from the variable domain to the CH2 domain using specific primers (e.g., SEQ ID NO: 2646 and SEQ ID NO: 2647), a step of separating the V_{H}H genes that lack CH1 domain from conventional IgG (having CH1 domain) using DNA gel electrophoresis, a step of re-amplifying from framework 1 to framework 4 using a 2nd-Forward primer (e.g., SEQ ID NO: 2648) and a 2nd-Reverse primer (e.g., SEQ ID NO: 2649), a step of purifying the amplicon of this second PCR (e.g., using a PCR clean up kit or isolation kit), a step of another PCR with primers to add adapter for sequencing analysis (e.g., using forward primer SEQ ID NO: 2650 and reverse primer SEQ ID NO: 2651) for sequencing analysis (e.g., MiSeq sequencing analysis). The methods for sequencing analysis can be, for example, single molecule real time (SMRT) sequencing, nanopore DNA sequencing, massively parallel signature sequencing (MPSS), polony sequencing, 454 pyrosequencing, Illumina (Solexa) sequencing, combinatorial probe anchor synthesis (cPAS), SOLiD sequencing, or MiSeq sequencing.

[0097] Step d. above can be performed concurrently, prior, or following steps a, b, and/or c. In some examples, step d. further comprises obtaining plasma from the blood sample and isolating nanobodies using one or more affinity isolation methods. The affinity isolation methods can be any affinity isolation methods known in the art, including, for example, protein G sepharose affinity chromatography, protein A sepharose affinity chromatography, hydroxylapatite chromatography, gel electrophoresis, or dialysis. Protein G sepharose affinity chromatography and protein A sepharose affinity chromatography are two well-known affinity chromatography methods (Grodzki A. C., Berenstein E. (2010) Antibody Purification: Affinity Chromatography—Protein A and Protein G Sepharose. In: Oliver C., Jamur M. (eds) Immunocytochemical Methods and Protocols. Methods in Molecular Biology (Methods and Protocols), vol 588. Humana Press.) The methods rely on the reversible interaction between a protein and a specific ligand immobilized in a chromatographic matrix. The sample is applied under conditions that favor specific binding to the ligand as the result of electrostatic and hydrophobic interactions, van der Waals' forces, and/or hydrogen bonding. After washing away the unbound material, the bound protein is recovered by changing the buffer conditions to those that favor desorption. Protein A sepharose affinity chromatography and G sepharose affinity chromatography are commonly used in antibody purification due to the high binding affinity and specificity of Protein A or G with the Fc region of the antibody. In some embodiments, the one or more affinity isolation methods of step d. comprise one or more of protein G sepharose affinity chromatography and protein A sepharose affinity chromatography.

[0098] In some examples, step d. also further comprises a functional selection step comprising selecting antigen-specific nanobodies using an antigen-specific affinity chromatography and eluting the antigen-specific nanobodies under varying degrees of stringency thereby creating different nanobody fractions, and performing steps e. through i. on each fraction individually and estimating an affinity of each different step i. CDR3, CDR2 and/or CDR1 region sequence for the antigen based on a relative abundance of the CDR3, CDR2 and/or CDR1 region sequence in each of the nanobody fractions, respectively. In some embodiments, the antigen-specific affinity chromatography is a resin conjugated to the antigen. In some embodiments, the antigen-specific affinity chromatography is a resin coupled to maltose binding protein and the antigen.

[0099] It should be understood and herein contemplated that the term “degrees of stringency” refers to different concentrations of salt buffer (e.g., from about 0.1M to about 20 M MgCl₂ in neutral pH buffer, preferably from about 1 M to about 10 M MgCl₂ in neutral pH buffer, or preferably from about 1M to about 4.5 M MgCl₂ in neutral pH buffer), alkaline solutions with different pH values (e.g., 1-100 mM NaOH, about pH 11, 12 and 13), acidic solutions with different pH values (e.g., 0.1 M glycine, about pH 3, 2 and 1), or a combination thereof. It should also be understood that the term “different nanobody fractions” or “different biochemistry fractions” refers to different fractions of nanobodies that are eluted from an antigen-coupled solid support (e.g., a resin) under the different degrees of stringency. The nanobodies that are most resistant to high salt, high acidity or high alkalinity conditions have the highest affinity to the antigen.

[0100] The term “digestion products” herein, such as in step e., refers to the mixture of peptides following the step of digestion with an enzyme (including, for example, trypsin, chymotrypsin, LysC, GluC, and AspN). In some examples, the nanobodies are digested with trypsin(such as Pierce™ Trypsin Protease, MS Grade, Catalog number: 90057), chymotrypsin (such as Pierce™ Chymotrypsin Protease (TLCK treated), MS Grade, Catalog number: 90056), LysC (or Lys-C protease, such as Pierce™ Lys-C Protease, MS Grade, Catalog number:. 90051), GluC (or Glu-C Protease, such as Pierce™ Glu-C Protease, MS Grade, Catalog number:. 90054), and/or AspN (or Asp-N protease, such as Pierce™ Asp-N Protease, MS Grade, Catalog number: 90053) to create the corresponding digestion products. Trypsin, chymotrypsin, LysC, GluC, and AspN are enzymes that digest proteins. The cleavage rules for digestion of nanobodies by these enzymes are:
[0101] Trypsin: C-terminal to K/R, not followed by P
[0102] Chymotrypsin: C-terminal to W/F/UY, not followed by P
[0103] GluC: C-terminal to D/E, not followed by P
[0104] AspN: N-terminal to D
[0105] LysC: C-terminal to K

[0106] The digestion step can be performed at a temperature from about 2° C. to about 60° C. (e.g., at about 2° C., 4° C., 6° C., 8° C., 10° C., 12° C., 14° C., 16° C., 18° C., 20° C., 22° C., 24° C., 26° C., 28° C., 30° C., 32° C., 34° C., 36° C., 38° C., 40° C., 42° C., 44° C., 46° C., 48° C., 50° C., 52° C., 54° C., 56° C., 58° C., or 60° C.) for about 5 min, 10 min, 30 min, 45 min, 1 hour, 2 hours, hours, 4 hours, 6 hours, 8 hours, 10 hours, 12 hours, 14 hours, 16 hours, 18 hours, 20 hours, 22 hours, 24 hour, 36 hours, 48 hours, or 72 hours.

Amino Acid Abbreviations

| Amino Acid | Abbreviations | |
|---|---|---|
| Alanine | Ala | A |
| allosoleucine | AIle | |
| Arginine | Arg | R |
| asparagine | Asn | N |
| aspartic acid | Asp | D |
| Cysteine | Cys | C |
| glutamic acid | Glu | E |
| Glutamine | Gln | Q |
| Glycine | Gly | G |
| Histidine | His | H |
| Isolelucine | Ile | I |
| Leucine | Leu | L |
| Lysine | Lys | K |
| phenylalanine | Phe | F |
| proline | Pro | P |
| pyroglutamic acid | pGlu | |
| Serine | Ser | s |
| Threonine | Thr | T |
| Tyrosine | Tyr | Y |
| Tryptophan | Trp | W |
| Valine | Val | V |

[0107] Step f. comprises performing a mass spectrometry analysis of the digestion products to obtain mass spectrometry data. The methods of using mass spectrometry for peptide analysis are well-known in the art. In some embodiments, the mass spectrometry analysis herein is performed in combination with gas chromatography (GC-MS), liquid chromatography (LC-MS), capillary electrophoresis (CE-MS), ion mobility spectrometry-mass spectrometry (IMS/MS or IMMS), Matrix Assisted Laser Desorption Ionisation (MALDI-TOF), Surface Enhanced Laser Desorption Ionization (SELDI-TOF), or Tandem MS (MS-MS). This step can identify the sequence of the nanobody, or a portion of a nanobody in the sample, based on mass of the amino acids and sequence homology search in a database of polypeptides translated from the cDNA library of step b. In some examples, mass spectrometry is used to analyze and generate a spectrum of digestion products from each nanobody fraction separately. In some examples, the spectrum of the digestion productions refers to the electron ionization data that are present as intensity versus m/z (mass-to-charge ratio) plot.

[0108] It should be understood herein that the nanobody sequence determination is not only based on mass spectrometry. It is determined by matching/correlating the sequences identified by mass spectrometry with the sequences the cDNA library identified by sequencing. The matched sequences are then selected. Accordingly, step g. comprises selecting sequences identified in step c. that correlate with the mass spectrometry data and step h comprises identifying sequences of CDR3 regions in the sequences from step g.

[0109] Step i. comprises selecting from the CDR3, CDR2 and/or CDR1 region sequences of step h. those sequences having equal to or more than a required fragmentation coverage percentage. In some embodiments, the fragmentation coverage percentage is equal to or more than about 30% (for example, about 30%, 35%, 40%, 45%, 50%, 55%, 60%, 65%, 70%, 75%, 80%, 85%, 90%, 95%, or 99%) for trypsin-treated samples. In some embodiments, the fragmentation coverage percentage is equal to or more than about 30% (for examples, at least about 30%, 35%, 40%, 45%, 50%, 55%, 60%, 65%, 70%, 75%, 80%, 85%, 90%, 95%, or 99%) for chymotrypsin-treated samples. In some embodiments, the fragmentation coverage percentage is about 50% for trypsin-treated samples and about 40% for chymotrypsin-treated samples.

[0110] In some embodiments, the method described herein further comprises creating a nanobody comprising a CDR3, CDR2 and/or CDR1 region having a sequence identified in step i. The nanobody genes are cloned into a vector, which is then transformed into competent cells for nanobody protein expression, extraction and purification.

[0111] In some embodiments, the nanobody comprises an amino acid sequence at least 80% (for examples, at least about 80%, 85%, 90%, 95%, 98% or 99%) identical to a sequence selected from the group consisting of SEQ ID NOs: 1-157. In some embodiments, the nanobody has a sequence selected from the group consisting of SEQ ID NOs: 1-157. In some embodiments, the nanobody comprises an amino acid sequence at least 80% (for examples, at least about 80%, 85%, 90%, 95%, 98% or 99%) identical to a sequence selected from the group consisting of SEQ ID NOs: 158-2536. In some embodiments, the nanobody has a sequence selected from the group consisting of SEQ ID NOs: 158-2536. In some embodiments, the nanobody comprises an amino acid sequence at least 80% (for examples, at least about 80%, 85%, 90%, 95%, 98% or 99%) identical to a sequence selected from the group consisting of SEQ ID NOs: 2665-2667. In some embodiments, the nanobody has a sequence selected from the group consisting of SEQ ID NOs: 2665-2667.

[0112] Disclosed herein is a PDZ-specific nanobody, wherein the PDZ-specific nanobody comprises an amino acid sequence selected from the group consisting of SEQ ID NOs: 158-2536. Also disclosed herein is a PDZ-specific nanobody, wherein the PDZ-specific nanobody comprises an amino acid sequence selected from the group consisting of SEQ ID NOs: 143-157. As used herein, “PDZ” refers to an 80-100 amino acid domain found in signaling proteins that have also been referred to as DHR (Dlg homologous region) or GLGF (glycine-leucine-glycine-phenylalanine) domains. PDZ domains bind to a short region of the C-terminus of other specific proteins. PDZ domains are conventionally divided into three different classes, categorized by the chemical nature of their ligands. Different ligand classes are distinguished by differences in the penultimate binding residues found at the extreme COOH of target proteins. Type I domains recognize the sequence, X-S/T-X-Φ* (where X=any amino acid, Φ=hydrophobic amino acid, * COOH terminus). Type II domains bind to ligands with the sequence X-Φ-X-Φ*. Type III domains interact with sequences with X-X-C*. Binding specificity within each domain class can be conferred by the variant (X) residues as well as residues outside the canonical binding motif. Moreover, a few PDZ domains do not fall into any of these specific classes. Proteins that contain PDZ domains include, but are not limited to, Erbin, GRIP, Htra1, Htra2, Htra3, PSD-95, SAP97, CARD10, CARD11, CARD14, PTP-BL, and SYNJ2BP. In some embodiments, the PDZ domain is from SYNJ2BP.

[0113] Disclosed herein is a GST-specific nanobody, wherein the GST-specific nanobody comprises an amino acid sequence in Table 4. Also disclosed herein is a GST-specific nanobody, wherein the GST-specific nanobody comprises an amino acid sequence selected from the group consisting of SEQ ID NOs: 1-98. “Glutathione S-transferase” or “GST” refers herein to glutathione-S-transferases (GSTs) are a family of Phase II detoxification enzymes that catalyze the conjugation of glutathione (GSH) to a wide variety of endogenous and exogenous electrophilic compounds. In some embodiments, the GST polypeptide is that in the pGEX6p-1 vector.

[0114] Disclosed herein is a HSA-specific nanobody, wherein the HSA-specific nanobody comprises an amino acid sequence in Table 5. Also disclosed herein is a HSA-specific nanobody, wherein the HSA-specific nanobody comprises an amino acid sequence selected from the group consisting of SEQ ID NOs: 99-142. “Human serum albumin” or “HSA” refers herein to a polypeptide encoded by the ALB gene. In some embodiments, the HSA polypeptide is that identified in one or more publicly available databases as follows: HGNC: 399, Entrez Gene: 213, Ensembl: ENSG00000163631, OMIM: 103600, UniProtKB: P02768. In some embodiments, the HSA polypeptide comprises the sequence of SEQ ID NO: 2668, or a polypeptide sequence having at or greater than about 80%, about 85%, about 90%, about 95%, or about 98% homology with SEQ ID NO: 2668, or a polypeptide comprising a portion of SEQ ID NO: 2668. The HSA polypeptide of SEQ ID NO: 2668 may represent an immature or pre-processed form of mature HSA, and accordingly, included herein are mature or processed portions of the HSA polypeptide in SEQ ID NO: 2668.

[0115] Here a robust proteomic pipeline was developed for large-scale quantitative analysis of antigen-engaged Nb proteomes and epitope mapping based on high-throughput structural characterization of antigen-Nb complexes.

### EXAMPLES

### Example 1. The Superiority of Chymotrypsin for Large-Scale Nb Proteomics Analysis

[0116] The variable domains of HcAb (VHH/Nb) cDNA libraries were amplified from the B lymphocytes of two lama glamas, recovering 13.6 million unique Nb sequences in the databases by the next-generation genomic sequencing (NGS) (DeKosky, 2013). Approximately half a million Nb sequences were aligned to generate the sequence logo (FIG. 1A,7A). CDR3 loops have both the largest sequence diversity and length variation providing excellent specificity for Nb identifications (FIG. 1B, 1C). In silico analysis of Nb databases revealed that trypsin predominantly produced large CDR3 peptides due to the limited number of trypsin cleavage sites on Nbs (FIG. 1A). As a result, the majority of the CDR3 residues (77%) were covered by large tryptic peptides of more than 2.5 kDa (FIG. 1D, 1E), which are suboptimal for proteomic analysis (FIG. 7B). In comparison, chymotrypsin, which is infrequently used for proteomics cleaving specific aromatic and hydrophobic residues, appears to be more suitable (Methods, FIG. 1A, 7B). 91% of CDR3 sequences can be covered by chymotryptic peptides less than 2.5 kDa (FIG. 1D, 1E). Random selection and simulation confirmed that significantly more CDR3 sequences can be covered by chymotrypsin than trypsin (FIG. 1F). Moreover, there was a small overlap (˜9%) between the two enzymes, indicating their good complementarity for efficient Nb analysis.

[0117] The estimated false discovery rate (FDR) of CDR3 identifications can be inflated due to the large database size and the unusual Nb sequence structure. To test this, antigen-specific HcAbs were proteolyzed with trypsin or chymotrypsin, and a state-of-the-art search engine was employed for identification using two different databases: a specific “target” database derived from the immunized llama, and a “decoy” database of similar size from an irrelevant llama with literally no identical sequences (FIG. 7D). Any CDR3 peptides identified from the decoy database search were thus considered as false positives (Elias, J. E. & Gygi, S. P, 2007). A large number of false positive CDR3 peptides were nonspecifically identified from the decoy database search. It was found that these spurious peptide-spectrum-matches generally contained poor MS/MS fragmentations on the CDR3 fingerprint sequences (FIG. 7E, 7F). The vast majority (95%) of these erroneous matches can be removed by using a simple fragmentation filter that we have implemented, requiring a minimum coverage of 50% (by trypsin, FIG. 1G) and 40% (by chymotrypsin, FIG. 1H) of the CDR3 high-resolution diagnostic ions in the MS2 spectra (FIG. 1K, 1L). The filter was further optimized based on the CDR3 length (FIG. 1I, 1J) before integrating into the new, open-source software “Augur Llama” (FIG. 8A-8C) for reliable Nb proteomic analysis.

### Example 2. Development of an Integrative Proteomics Pipeline for Nb Discovery and Characterization

[0118] A robust platform is shown herein for comprehensive quantitative Nb proteomics and high-throughput structural characterizations of antigen-Nb complexes (Methods, FIG. 2A). A domestic camelid was immunized with the antigens of interest. The Nb cDNA library was then prepared from the blood and/or bone marrow of the immunized camelid (Fridy, 2014). NGS was performed to create a rich database of >10′ unique Nb protein sequences (FIG. 8E, 8F). Meanwhile, antigen-specific V_{H}Hs were affinity isolated from the sera and eluted using step-wise gradients of salts or pH buffers. Fractionated HcAbs were efficiently digested with trypsin or chymotrypsin to release Nb CDR peptides for identification and quantification by nanoflow liquid chromatography coupled to high-resolution MS. Initial candidates that pass database searches were annotated for CDR identifications. CDR3 fingerprints were filtered to remove false positives, their abundances from different biochemical fractions were quantified to infer the Nb affinities, and assembled into Nb proteins—all of the above steps were automated by Augur Llama. The pipeline enables identification and characterization of an unprecedented scale of diverse, specific, and high-quality Nbs. In parallel, to enable structural analysis of tens of thousands of antigen-Nb interactions, a robust method have been developed to integrate high-throughput computational docking (Schneidman-Duhovny, 2005), cross-linking and mass spectrometry (CXMS) (Chait, 2016; Rout, 2019; Yu, 2018; Leitner, 2016), and mutagenesis. A deep-learning approach was further developed to learn the latent features associated with the Nb repertoires.

### Example. 3. Robust, In-Depth, and High-Quality Identifications of Antigen-Specific Nbs

[0119] To validate this pipeline, three benchmark antigens were chosen: glutathione S-transferase (GST), human serum albumin (HSA)-an important drug target (Larsen, 2016), and a small PDZ domain derived from mitochondrial outer membrane protein 25. These antigens span three orders of magnitude of immune responses with PDZ only weakly immunogenic (FIG. 2B) and are ideal to assess the robustness of our technologies.

[0120] Here 64,670 unique Nb_{GST} sequences (9,915 unique CDR combinations from 3,453 CDR3 Nb families), 34,972 unique Nb_{HSA} (7,749 unique CDRs from 2,286 unique CDR3 Nb families) and a smaller cohort of 2,379 high-quality Nb_{PD}z sequences (495 unique CDRs from 230 CDR3 families) were identified (Methods, FIG. 2C, 8G). It was confirmed that chymotrypsin provided the most useful fingerprint information for Nb identification from the various proteases tested (FIG. 2D, 2E). The Nb repertoires exhibited exceptional CDR3 diversity (FIG. 8D).

[0121] A random set of 146 Nbs was selected from among the three antigen-specific Nb groups and expressed in E. coli. A group of 130 Nbs (89%) exhibited excellent solubility and can be readily purified in large quantities (FIG. 2F). Complementary approaches were taken, including immunoprecipitation, ELISA, and SPR, to evaluate the antigen binding (Methods, FIG. 2G, 9C, 9D, 10, Tables 1-3). Nbs identified by trypsin and chymotrypsin were comparably high-quality (FIG. 8H). 86.2% (CI_{95%}: 6.8%), 90.5% (CI_{95%}: 11.5%), and 100% true Nb binders were confirmed for GST, HSA and PDZ, respectively. These results demonstrate the high sensitivity and specificity of this approach.

### Example 4. Accurate Large-Scale Quantification and Clustering of Nb Proteomes

[0122] Different strategies were evaluated for accurate classification of Nbs based on affinities. Briefly, antigen-specific HcAbs were affinity isolated from the serum and eluted by the step-wise high-salt gradients, high pH buffers, or low pH buffers (Methods, FIG. 8I, 8J). Different HcAbs fractions were accurately quantified by label-free quantitative proteomics (Zhu, 2010; Cox, J. & Mann, M, 2008). The CDR3 peptides (and the corresponding Nbs) were then clustered into three groups based on their relative ion intensities (FIGS. 3A, 3B, 9A, and 9B). This classification assigns 31% of Nb_{GST} and 47% of Nb_{HSA} into the C3 high affinity group by the high pH method (FIG. 3C). A number of Nb_{GST} with unique CDR3 sequences from each cluster were randomly expressed and their affinities were measured by ELISA and SPR (R²=0.85, FIG. 3D, Table 1) to evaluate different fractionation methods. While the low pH method did not provide sufficient resolution to separate different affinity groups, the salt gradient and particularly the high pH method, enabled significant and reproducible separations of Nbs based on their affinities (FIG. 3E). Nbs from high pH clusters 1 and 2 (C1, C2) generally have low and mediocre affinities, respectively, from μM to dozens of nM, while over 50% of C3 were ultrahigh affinity, sub-nM binders (FIG. 3H, 9D). To further verify this result, a random set of 25 Nb_{HSA} (with divergent CDR3s) were purified from C3, and ranked their ELISA affinities (FIG. 3F, Table 2). The top 14 Nb_{HSA} were selected for SPR measurements, in which 11 have dozens to hundreds of pM affinities with diverse binding kinetics. The remaining 3 Nb_{HSA} demonstrated single-digit nM K_{D}'s. (FIG. 3I, 10A). 13 soluble Nb_{PDZ} were purified and their high affinities were confirmed by ELISA and immunoprecipitation (FIG. 3G, 10B, and Table 3). The K_{D} of a representative, highly soluble Nb_{PDZ} P10 was 4.4 μM (FIG. 3J).

[0123] The ultrahigh affinity Nbs for immunoprecipitation (Nb_{GST}) and fluorescence imaging (Nb_{PDZ}) of native mitochondria (FIG. 3K, 3L) were further positively evaluated. The quantitative approach enables large-scale and accurate classification of Nb proteomes based on desirable properties such as affinities.

### Example 5. The Landscapes of Antigen-Engaged Nb Proteomes Revealed by Integrative Structure Determination Methods

[0124] Identification and classification of large repertoires of high-quality Nbs allow to the investigation on the global structure landscapes of antigen-engaged humoral immune response. Structural docking and clustering of 34,972 Nb_{HSA} revealed three dominant HSA epitopes (FIG. 4A). The presence of abundant native serum albumin (76% identical to HSA, FIG. 12H) allowed the investigation on the specificity of the camelid humoral immunity. The two albumin sequences were aligned and their variations were calculated based on pI and hydropathy (Methods, FIG. 4A). All three epitopes are co-localized with the major peaks of pI and hydropathy which correspond to the large sequence differences. This result illustrates the exceptional specificity of antigen recognition by Nbs. It appears that Nbs preferentially bind stable helical secondary structures (FIG. 4B). It was found that the epitopes were highly charged. E2 and E3 were predominantly negative (−4 and −5 net formal charges respectively, FIG. 13D), while E1 was more heterogeneous with mixed charges −2 net formal charges) (FIG. 4C).

[0125] 19 HSA-Nb complexes (Shi, 2014; Kim, 2018) were cross-linked to verify the epitopes identified by docking. Overall, 92% of cross-links were satisfied by the models, which have a median RMSD of 5.6 Å (FIG. 4J, 4K). Cross-linking confirmed the docking results and identified two epitopes (E2, E3) that were heavily populated (65% and 20%, respectively) (FIG. 4D, Table 2). E1 was identified by cross-links with low abundance (5%). Cross-linking also identified additional two minor epitopes that were not revealed by docking (FIG. 4D). High shape complementarity was observed between HSA and Nbs involving convex Nb paratopes and concave HSA epitopes (FIG. 4E-4G). To further confirm the dominant E2, we introduced a single point mutation on HSA, E400R with minimal impact on the overall structure (Pires, 2016). The resulting mutation reverses the surface charge to mimic the positive charge at the orthologous position in E2 of camelid albumin, potentially disrupting a salt bridge formed between it and an arginine in the Nb CDR3 (FIG. 4H). 19 high-affinity binders were then selected and this point mutation on HSA-Nb interactions was evaluated by ELISA (FIG. 4I, Table 2). E400R almost completely abolished the binding of 5 out of 19 Nbs (26%) that were tested, indicating that E2 is a bonafide major epitope.

[0126] This approach was further employed to map the epitopes of 64,670 GST-Nb complexes. Three major epitopes on GST were accurately identified (FIG. 11A, 11B, 11F, 11G) and were verified by cross-links with relative abundances of 18.75%, 31.25%, and 50% for E1, E2, and E3, respectively (FIGS. 11D, 11E). E1 and E3 contain negatively charged surface patches. E2 overlapped with GST dimerization cavity (FIG. 11C); in the models shown herein E2 Nbs insert their CDR3s into this cavity. Similar to HSA, preference to charged surface residues and high shape complementarity of Nbs were confirmed. Together, these results indicate that Nbs can bind diverse protein surfaces and prefer highly charged cavities on the antigen.

### Example 6. Exploring the Mechanisms of Nb Affinity Maturation

[0127] The physicochemical and structural features that distinguish high-affinity (matured) and low-affinity Nbs were investigated, based on the high pH dataset that was most reliably classified. Shorter CDR3s with distinct distributions for high-affinity binders for HSA and GST, respectively (FIG. 5A), lowering the entropy for antigen binding. A significant increase of pI was observed (FIG. 5B), from slightly acidic for low-affinity to relatively basic for high-affinity Nbs.

[0128] The contribution of CDRs to pI and hydropathy of the Nbs were compared, and it was determined that CDR3_{HSA} was primarily responsible for polarity shifts in Nb_{HSA} while CDR1_{GST} and CDR2_{GST} were primarily responsible for polarity shifts in Nb_{GST} (FIG. 5C). It was observed that high-affinity Nbs are slightly more hydrophilic (FIG. 5D).

[0129] The structure of a CDR3 can be considered as having a “head” region consisting of the highest sequence variability, and a “torso” region of lower specificity (Finn, 2016) (FIG. 5E). Certain residues were enriched on CDR3 heads, including aspartic acid and arginine (forming strong electrostatic interactions) (Tiller, 2017), small and flexible residues of glycine and serine, hydrophobic residues such as alanine and leucine, and aromatic residue of tyrosine (FIG. 5F, and FIG. 12). Nbs of different affinity groups were compared and three major differences were found. First, high-affinity Nbs were more enriched with charged residues (Mitchell, L. S. & Colwell, L J, 2018) (Methods, FIG. 5G). Second, intricate differences were identified for different antigens: high-affinity Nb_{HSA} tend to strengthen the electrostatics by increasing positively charged residues (39%) and decreasing (46%) negatively charged residues on the CDR3 heads. High-affinity Nb_{GST} predominantly altered their charges on other CDRs. Increases of 29.2% and 117.2% of positively charged residues and decreases of 44.2% and 21.5% of negatively charged residues were found on CDR1 and CDR2, respectively. The changes in charge may increase the physicochemical complementarity between the Nb and the epitope. Third, tyrosine (51%), glycine and serine (58%) were more enriched on CDR3 heads for high-affinity Nb_{HSA}. For high-affinity Nb_{GST}, there was an increase in tyrosines (73%) in CDR3 heads but the fractions of glycine and serine were hardly affected.

[0130] To further explore the putative roles of these residues for augmenting HSA binding affinity, their location frequency was calculated along the CDR3 heads (FIG. 5H). Tyrosine is more frequently found at the center of CDR3 heads for high-affinity Nb_{HSA} enabling its bulky, aromatic side chain to insert into specific epitope pocket(s) (Desmyter, 1996; Li, 2016). Glycine and serine tend to be placed away from the CDR3 center, providing additional flexibilities and facilitating the orientation of the tyrosine side chain in the antigen pocket. These results were confirmed by the correlation analysis between the number of these residue groups and ELISA affinities of our purified Nbs (FIG. 5I, 5J).

[0131] A deep learning model was developed to learn the latent features that enable Nb affinity classification (Methods). The most informative Nb_{HSA} CDR3 filter for high-affinity binder classification revealed a pattern of consecutive lysine and arginine, tyrosines and glycines (FIG. 5K, Table 4). For low-affinity binders, the most informative filter has preference for phenylalanine, histidine, and two consecutive aspartic acids. Moreover, this analysis revealed a tendency for consecutive pairs of negative and positive charges for high- and low-affinity binders, respectively.

### Example 7. The Outstanding Versatility and Resilience of Nbs for Antigen Recognition

[0132] Identification of hundreds of divergent, high-affinity Nb_{CDR3} families for the weakly immunogenic PDZ domain prompted the investigation of the structural basis of such interactions. Two putative epitopes were identified based on docking (FIG. 6A, 13B). E2 can be the major epitope because it has a large positively charged surface (FIG. 6A, 6B) and it is more structured with an α helix and two P-strands. E2 overlapped with the conserved ligand binding sites that are shared among numerous PDZ interacting proteins (Sheng, 2001; Doyle, 1996) (FIG. 6C). Remarkably, Nb_{PDZ} have obtained >100,000-fold higher affinity than natural PDZ ligands (in μM affinity)(Niethammer, 1998) (FIG. 3J). Such high affinity likely was achieved by a long CDR3 loop wrapping around the small and shallow epitope, forming extensive electrostatic and hydrophobic interactions (FIG. 6C, 13A). Modeling results indicated that R46 and K48 of the second β strand in the PDZ epitope formed salt bridges with the corresponding residues in Nb_{PDZ}. A double mutant PDZ (R46E:K48D) was produced and its affinity was evaluated to Nb_{PDZ} by ELISA. The majority (8/11) of Nb_{PDZ} exhibited significantly decreased or no affinity for the mutant, confirming that E2 is indeed the major epitope (FIG. 6D).

[0133] There are several other observations on Nb_{PDZ}. First, the distribution of CDR3 loop length formed one major peak with a median of ˜20 aa that pushed the upper limit of its natural distribution (FIG. 6E). Second, Nb_{PDZ} are rather acidic with a median pI of 4.9 (FIG. 6F), which is largely contributed by CDR3 (FIG. 6E, 13F). Third, despite their acidic nature, Nb_{PDZ} did not seem to appreciably alter hydropathy, due to the compensation of hydrophobic residues (FIG. 6G, 13E). Finally, there were significant increases of negatively charged aspartic acid and small glycines and serines, accounting for half of the CDR3 head residues; decrease of bulky tyrosine was also evident compared with high-affinity Nb_{GST} and Nb_{HSA} reflecting the rather shallow pocket of E2 for binding (FIG. 7C, 7E). Collectively, these results demonstrated a remarkable versatility of Nbs for antigen binding.

[0134] This study reports the development of a robust platform integrating proteomics, informatics, and structural modeling technologies for analysis of antigen-engaged Nb proteomes. The pipeline enables sensitive and reliable identification of a large repertoire of high-quality Nbs against different challenging antigens. It also enables accurate classification of circulating Nbs based on their physicochemical properties. Thousands of ultrahigh-affinity Nbs were identified by our technologies. Combining computational docking and structural proteomics, the present study have structurally characterized 102,673 antigen-Nb complexes, mapped, and validated the dominant epitopes. This “big data” analysis permits for the first time, global-scale proteomic and structural dissections of the humoral immune response.

[0135] These results revealed, at unprecedented depth, the efficiency, specificity, diversity, and versatility of antigen-engaged Nbs that together shape the epic landscapes of camelid antibody immunity (FIG. 6H).

[0136] Efficiency: Nbs efficiently utilize both shape and electrostatic complementarity for binding. Specific residues such as charged aspartic acids and arginines, aromatic tyrosines, and small, flexible glycines and serines permit loop flexibility that result in high-affinity Nbs. Intricate and fine-tuned interactions specific for different CDRs were revealed. Moreover, the presence of multiple dominant epitope for Nb binding was confirmed, which can act as a general mechanism for efficiently recognizing pathogens (Akram, A. & Inman, R. D, 2012).

[0137] Specificity and Diversity: Thousands of highly divergent Nbs were discovered that evolved to recognize specific HSA surface pockets with some of the most pronounced sequence variations (FIG. 4A) to ensure a specific, effective, and safe immune response.

[0138] Versatility: for antigens that tend to evade immune response such as the PDZ, Nbs can drastically alter the size and the physicochemical properties of paratopes to mimic natural ligand binding with outstanding affinity and specificity. The study shows the fascinating rapid evolution of protein-protein interactions.

[0139] Nbs are highly potent in viral neutralization and inhibition of enzymatic activities (Lauwereys, 1998; Desmyter, 1996; Acharya, 2013; Arabi, 2017). These findings indicate that these highly robust and efficient camelid HcAbs are evolutionarily advantageous for their survival in both arid natural habitats and aggressive pathogenic challenges, while the driving force(s) behind such an incredible selection and adaptation remains enigmatic (Flajnik, 2011).

[0140] These technologies can find broad utility in challenging biomedical applications such as cancer biology, brain research, and virology. These informatics tools for Nb proteomics can be freely available to the research community. The high-quality Nb datasets can serve as a blueprint to study antibody-antigen and can facilitate computational antibody design (Sircar, 2011; Baran, 2017; Chevalier, 2017).

### Example 8. Methods

[0141] Animal immunization. Two Llamas were respectively immunized with HSA, and a combination of GST and GST fusion PDZ domain of Mitochondrial outer membrane protein 25 (OMP25) at the primary dose of 1 mg, followed by three consecutive boosts of 0.5 mg every 3 weeks. The bleed and bone marrow aspirates were extracted from the animals 10 days after the last immuno-boost. All the above procedures were performed by Capralogics, Inc. following the IACUC protocol.

[0142] mRNA isolation and cDNA preparation. Approximately 1−3×10⁹ peripheral mononuclear cells were isolated from 350 ml immunized blood and 5−9×10⁷ plasma cells were isolated from 30 ml bone marrow aspirates using Ficoll gradient (Sigma). The mRNA was isolated from the respective cells using RNeasy kit (NEB) and was reverse-transcribed into cDNA using Maxima™ H Minus cDNA Synthesis Master Mix (Thermo). Camelid IgG heavy chain cDNA sequences from the variable domain to the CH2 domain were specifically amplified using primers CALL001 (GTCCTGGCTGCTCTTCTACAAGG, SEQ ID NO: 2646) and CH2FORTA4 (CGCCATCAAGGTACCAGTTGA, SEQ ID NO: 2647) (Abrabi, 1997). The VHH genes that lack CH1 domain were separated from conventional IgG and purified (Qiagen) by DNA gel electrophoresis, and were subsequently re-amplified from framework 1 to framework 4 using the 2nd-Forward (ATCTACACTCTITCCCTACACGACGCTCTTCCGATCTNNNNNNNNATGGCT[C/G]A[G/T]GTGCAGCTGGTGGAGTCTGG, SEQ ID NO: 2648, wherein N represents A, T, C or G) and 2nd-Reverse (GTGACTGGAGTTCAGACGTGTGCTCTTCCGATCTNNNNNNNNGGAGACGGTGACCTG GGT, SEQ ID NO: 2649, wherein N represents A, T, C or G). The random 8-mers replacing adaptor sequences were added to aid in cluster identification for Illumina MiSeq. The amplicon of the second PCR (approximately 450-500 bp) was purified using Monarch PCR clean up kit (NEB). The final round of PCR with primer MiSeq-F (AATGATACGGCGACCACCGAGATCTACACTCTITCCCTA, SEQ ID NO: 2650) and MiSeq-R (CAAGCAGAAGACGGCATACGAGATITCTGAATGTGACTGGAGTTCA, SEQ ID NO: 2651) was performed to add P5/P7 adapters with the index before MiSeq sequencing.

[0143] Next generation sequencing by Illumina Miseq. Sequencing was performed based on the Illumina MiSeq platform with the 300 bp paired-end model. More than 30 million reads were generated for each database. Read QC tool in FastQC v0.11.8 (www.bioinformatics.babraham.ac.uk/projects/fastqc/) was used for quality check and control of the FASTQ data. Raw Illumina reads were processed by the software tools from the BBMap project (github.com/BiolnfoTools/BBMap/). Duplicated reads and DNA barcode sequences were removed successively before converting the nucleotide sequences into amino acid sequences.

[0144] Isolation and biochemical fractionation of V_{H}H antibodies from immunized sera. Approximately 175 ml of plasma was isolated from 350 ml of immunized blood by Ficoll gradient (Sigma). Camelid single-chain V_{H}H antibodies were isolated from the plasma supernatant by a two-step purification procedure using protein G and protein A sepharose beads (Marvelgent), acid-eluted, before neutralized and diluted in 1xPBS buffer to a final concentration of 0.1-0.3 mg/ml. To purify antigen-specific V_{H}H antibodies, the GST or HSA-conjugated CNBr resin was incubated with the VHH mixture for 1 hr at 4C and extensively washed with high salt buffer (1xPBS and 350 mM NaCl) to remove non-specific binders. Specific V_{H}H antibodies were then released from the resin by using one of the following elution conditions: alkaline (1-100 mM NaOH, pH 11, 12 and 13), acidic (0.1 M glycine, pH 3, 2 and 1) or salt elution (1M-4.5 M MgCl₂ in neutral pH buffer). For purification of PDZ-specific VHH, a fusion protein of MBP-PDZ (where the maltose binding protein/MBP was fused to the N terminus of PDZ domain to avoid steric hindrance of the small PDZ after coupling) was produced and was used as the affinity handle. MBP coupled resin was used for control (FIG. 6J). All the eluted V_{H}Hs were neutralized and dialyzed into 1x DPBS separately prior to proteomics analysis.

[0145] Proteolysis of Antigen Specific Nbs and Nanoflow Liquid Chromatography coupled to Mass spectrometry (nLC/MS) Analysis. For GST and HSA V_{H}Hs, each elution was processed separately according to the following protocol. For PDZ specific V_{H}Hs, only the most stringent biochemical elutes (i.e., pH 13, pH 1, MgCl₂ 3M and 4.5M) and the respective nonspecific MBP binders (negative controls) from different fractions were pooled for proteolysis. For instance, For PDZ-specific V_{H}Hs that were eluted by pH13 buffer, non-specific MBP binding Nbs were pooled from pH 11, pH12 and pH13 fractions for negative control to improve the stringency of our downstream LC/MS quantification. V_{H}Hs were reduced in 8M urea buffer (with 50 mM Ammonium bicarbonate, 5 mM TCEP and DTr) at 57° C. for 1 hr, and alkylated in the dark with 30 mM Iodoacetamide for 30 mins at room temperature. The alkylated sample was then split into two and in-solution digested using either trypsin or chymotrypsin. For trypsin digestion samples, 1:100 (w/w) trypsin and Lys-C were added and digested at 37° C. overnight, with additional 1:100 trypsin the other morning for 4 hrs at 37° C. water bath. For chymotrypsin digestion samples, 1:50 (w/w) chymotrypsin was added and digested at 37° C. for 4 hrs. After proteolysis, the peptide mixtures were desalted by self-packed stage-tips or Sep-pak C18 columns (Waters) and analyzed with a nano-LC 1200 that is coupled online with a Q Exactive™ HF-X Hybrid Quadrupole Orbitrap™ mass spectrometer (Thermo Fisher). Briefly, desalted Nb peptides were loaded onto an analytical column (C18, 1.6 μm particle size, 100 Å pore size, 75 μm×25 cm; IonOpticks) and eluted using a 90-min liquid chromatography gradient (5% B-7% B, 0-10 min; 7% B-30% B, 10-69 min; 30% B-100% B, 69-77 min; 100% B, 77-82 min; 100% B-5% B, 82 min-82 min 10 sec; 5% B, 82 min 10 sec-90 min; mobile phase A consisted of 0.1% formic acid (FA), and mobile phase B consisted of 0.1% FA in 80% acetonitrile (ACN)). The flow rate was 300 nl/min. The QE HF-X instrument was operated in the data-dependent mode, where the top 12 most abundant ions (mass range 350-2,000, charge state 2-8) were fragmented by high-energy collisional dissociation (HCD). The target resolution was 120,000 for MS and 7,500 for tandem MS (MS/MS) analyses. The quadrupole isolation window was 1.6 Th and the maximum injection time for MS/MS was set at 80 ms.

[0146] Nb DNA synthesis and cloning. Nb genes were codon-optimized for expression in Escherichia coli and the nucleotides were in vitro synthesized (Synbiotech). After verification by Sanger sequencing, the Nb genes were cloned into a pET-21b (+) vector at BamHI and XhoI (for GST Nbs), or EcoRI and NotI restriction sites (for HSA and PDZ Nbs).

[0147] Purification of recombinant Proteins. DNA constructs were transformed into BL21 (DE3) competent cells according to manufacturer's instructions and plated on Agar with 50 pg/ml ampicillin at 37° C. overnight. A single colony was inoculated in LB medium with ampicillin for overnight culture at 37° C. The culture was then inoculated at 1:100 (v/v) in fresh LB medium and shaked at 37° C. until the O.D.600 nm reached 0.4-0.6. GST, GST-PDZ and Nbs were induced with 0.5 mM of IPTG while MBP and MBP-PDZ were induced with 0.1 mM of IPTG. The inductions were performed at 16° C. overnight. Cells were then harvested, briefly sonicated and lysed on ice with a lysis buffer (1xPBS, 150 mM NaCl, 0.2% TX-100 with protease inhibitor). After lysis, soluble protein extract was collected at 15,000×g for 10 mins. GST and GST-PDZ were purified using GSH resin and eluted by glutathione. MBP (maltose binding protein) and MBP-PDZ fusion protein were purified by using Amylose resin and were eluted by maltose according to the manufacturer's instructions. Nbs were purified by His-Cobalt resin and were eluted using imidazole. The eluted proteins were subsequently dialyzed in the dialysis buffer (e.g., 1x DPBS, pH 7.4) and stored at −80° C. before use.

[0148] Nb immunoprecipitation assay. After Nb induction and cell lysis, the cell lysates were run on SDS-PAGE to estimate Nb expression levels. Recombinant Nbs in the cell lysis were diluted in 1x DPBS (pH 7.4) to a final concentration of ˜5 μM (for GST Nbs) and ˜50 nM (for PDZ Nbs). To test the specific interactions of Nbs with antigens, different antigens were coupled to the CNBr resin. Inactivated or MBP-conjugated CNBr resin was used for control. Antigen coupled resins or control resins were incubated with Nb lysates at 4° C. for 30 mins. The resins were then washed three times with a washing buffer (1x DPBS with 150 mM NaCl and 0.05% Tween 20) to remove nonspecific bindings. Specific antigen bound Nbs were then eluted from the resins by the hot LDS buffer containing 20 mM DTT and ran on SDS-PAGE. The intensities of Nbs on the gel were compared between antigen specific signals and control signals to derive the false positive binding.

[0149] ELISA (enzyme-linked immunosorbent assay). Indirect ELISA was carried out to evaluate the camelid immune response of an antigen and to quantify the relative affinities of antigen-specific Nbs. An antigen was coated onto a 96-well ELISA plate (R&D system) at an amount of approximately 1-10 ng per well in a coating buffer (15 mM sodium carbonate, 35 mM sodium bicarbonate, pH 9.6) overnight at 4° C. The well surface was then blocked with a blocking buffer (DPBS, 0.05% Tween 20, 5% milk) at room temperature for 2 hours. To test an immune response, the immunized serum was serially 5-fold diluted in the blocking buffer. The diluted sera were incubated with the antigen coated wells at room temperature for 2 hours. HRP-conjugated secondary antibodies against llama Fc (Bethyl) were diluted 1:10,000 in the blocking buffer and incubated with each well for 1 hour at room temperature. For Nb affinity tests, scramble Nbs that do not bind the antigen of interest were used for negative controls. Nbs of both specific binders for test and scramble negative controls were serially 10-fold diluted from 10 μM to 1 μM in the blocking buffer. HRP-conjugated secondary antibodies against His-tag (Genscript) or T7-tag (Thermo) were diluted 1:5,000 or 1:10,000 in the blocking buffer and incubated for 1 hour at room temperature. Three washes with 1x PBST (DPBS, 0.05% Tween 20) were carried out to remove nonspecific absorbance between incubations. After the final wash, the samples were further incubated under dark with freshly prepared w3,3′,5,5′-Tetramethylbenzidine (TMB) substrate for 10 mins at room temperature to develop the signals. After the STOP solution (R&D system), the plates were read at multiple wavelengths (450 nm and 550 nm) on a plate reader (Multiskan GO, Thermo Fisher). A false positive Nb binder was defined if any of the following two criteria was met: i) the ELISA signal can only be detected at a concentration of 10 μM and was under detected at 1 μM concentration. ii) At 1 μM concentration, a pronounced signal decrease (by more than 10-fold) was detected compared to the signal at 10 μM, while there were no signals can be detected at lower concentrations. The raw data was processed by Prism 7 (GraphPad) to fit into a 4PL curve and to calculate logIC50.

[0150] Nb affinity measurement by SPR. Surface plasmon resonance (SPR, Biacore 3000 system, GE Healthcare) was used to measure Nb affinities. Antigen proteins immobilized on the activated CM5 sensor-chip by the following steps. Protein analytes were diluted to 10-30 μg/ml in 10 mM sodium acetate, pH 4.5, and were injected into the SPR system at 5 μl/min for 420 s. The surface of the sensor was then blocked by 1 M ethanolamine-HCl (pH 8.5). For each Nb analyte, a series of dilution (spanning three orders of magnitude) was injected in HBS-EP+ running buffer (GE-Healthcare) containing 2 mM DTT, at a flow rate of 20-30 μl/min for 120-180 s, followed by a dissociation time of 5-20 mins based on dissociation rate. Between each injection, the sensor chip surface was regenerated with the low pH buffer containing 10 mM glycine-HCl (pH 1.5-2.5), or high pH buffer of 20-40 mM NaOH (pH 12-13). The regeneration was performed with a flow rate of 40-50 μl/min for 30 s. The measurements were duplicated and only highly reproducible data was used for analysis. Binding sensorgrams for each Nb were processed and analyzed using BIAevaluation by fitting with 1:1 Langmuir model or 1:1 Langmuir model with mass transfer.

[0151] Cross-linking and mass spectrometric analysis of antigen-nanobody complex. Different Nbs were incubated with the antigen of interest with equal molarity in an amine-free buffer (such as 1x DPBS with 2 mM DTT) at 4° C. for 1-2 hours before cross-linking. The amine-specific disuccinimidyl suberate (DSS) or heterobifunctional linker 1-ethyl-3-(3-dimethylaminopropyl) carbodiimide hydrochloride (EDC) was added to the antigen-Nb complex at 1 mM or 2 mM final concentration, respectively. For DSS cross-linking, the reaction was performed at 23° C. for 25 mins with constant agitation. For EDC cross-linking, the reaction was performed at 23° C. for 60 mins. The reactions were quenched by 50 mM Tris-HCl (pH 8.0) for 10 mins at room temperature. After protein reduction and alkylation, the cross-linked samples were separated by a 4-12% SDS-PAGE gel (NuPAGE, Thermo Fisher). The regions corresponding to the cross-linked species were cut and in-gel digested with trypsin and Lys-C as previously described (Shi, 2014; Shi, 2015). After proteolysis, the peptide mixtures were desalted and analyzed with a nano-LC 1200 (Thermo Fisher) coupled to a Q Exactive™ HF-X Hybrid Quadrupole-Orbitrap™ mass spectrometer (Thermo Fisher). The cross-linked peptides were loaded onto a picochip column (C18, 3 μm particle size, 300 Å pore size, 50 μm×10.5 cm; New Objective) and eluted using a 60 min LC gradient: 5% B-8% B, 0-5 min; 8% B-32% B, 5-45 min; 32% B-100% B, 45-49 min; 100% B, 49-54 min; 100% B-5% B, 54 min-54 min 10 sec; 5% B, 54 min 10 sec-60 min 10 sec; mobile phase A consisted of 0.1% formic acid (FA), and mobile phase B consisted of 0.1% FA in 80% acetonitrile. The QE HF-X instrument was operated in the data-dependent mode, where the top 8 most abundant ions (mass range 380-2,000, charge state 3-7) were fragmented by high-energy collisional dissociation (normalized collision energy 27). The target resolution was 120,000 for MS and 15,000 for MS/MS analyses. The quadrupole isolation window was 1.8 Th and the maximum injection time for MS/MS was set at 120 ms. After MS analysis, the data was searched by pLink2 for the identification of cross-linked peptides (Chen, 2019). The mass accuracy was specified as 10 and 20 p.p.m. for MS and MS/MS, respectively. Other search parameters included cysteine carbamidomethylation as a fixed modification and methionine oxidation as a variable modification. A maximum of three trypsin missed-cleavage sites was allowed. The initial search results were obtained using the default 5% false discovery rate, estimated using a target-decoy search strategy. The crosslink spectra were then manually checked to remove false-positive identifications essentially as previously described (Shi, 2014; Kim, 2018; Shi, 2015).

[0152] Site-directed mutagenesis. Mammalian expression plasmid of HSA was obtained from Addgene. E400R point mutation was introduced to the HSA sequence by the Q5 site-directed mutagenesis kit (NEB) using the primer HSA-F (GGTGTTCGACCGGTTCAAGCCTCTGG, SEQ ID NO: 2652) and HSA-R (TTGGCGTAGCACTCGTGA, SEQ ID NO: 2653). After sequence verification by Sanger Sequencing, plasmids bearing wild type HSA and the mutant were transfected to HeLa cells using Lipofectamine 3000 transfection kit (Thermo) and Opti-MEM (Gibco) according to the manufacturer's protocol. The cells were cultured overnight before change of medium to DMEM without FBS supplements to remove BSA. After a 48 h culture at 37° C., 5% CO₂, the media expressing HSA were collected and stored at −20° C. The media were analyzed by SDS-PAGE and Western Blotting to confirm protein expression.

[0153] The PDZ domain (in the pGEX6p-1 vector) was obtained from the General Biosystems. A double point mutant of PDZ (i.e., R46E: K48D) was introduced by the Q5 Site-directed mutagenesis kit using specific primers of PDZ-F (TGATGAAAATGGCGCAGCCGCC, SEQ ID NO: 2654) and PDZ-R (ATITCACTCACATAGATACCACTATCATTACTAACATAC, SEQ ID NO: 2655). After verification by Sanger Sequencing, the mutant vector was transformed into BL21(DE3) cells for expression. The GST fusion PDZ mutant protein was purified by GSH resin as previously described.

[0154] Fluorescence Microscopy. COS-7 cells were plated onto the glass bottom dish at an initial confluence of 60-70% and cultured overnight to let the cells attach to the dish. Cells were with MitoTracker Orange CMTMRos (1:4000) at 37° C. for 30 minutes, washed once with PBS and fixed with pre-cold methanol/ethanol (1:1) for 10 minutes. After being washed with PBS, the cells were blocked with 5% BSA for 1 hour. Alexa Fluor™ 647-conjugated Nb (1:100) was then added to the cells, incubated for 15 minutes at room temperature. Two-color wide-field fluorescence images were acquired using our custom-built system on an Olympus IX71 inverted microscope frame with 561 nm and 642 nm excitation lasers (MPB Communications, Pointe-Claire, Quebec, Canada) and a 100×oil immersion objective (NA=1.4, UPLSAPO 100XO; Olympus).

[0155] Text-based CDR (complementarity-determining region) Annotation. The CDR annotation method was modified from (Fridy, 2014). [*] denotes any residue.

[0156] CDR1 annotation: The short sequence motif “SC” was first searched, which is localized between the residue 20-residue 26 of a Nb sequence. The start of a CDR1 sequence is defined as the 5th residue followed by the “SC” motif. Once the first residue is identified, we then look for another sequence motif “W[*]R” which is localized between Nb residue 32-residue 40, and define the end of the CDR1 sequence as the first residue preceding the “W[*]R” motif.

[0157] CDR2 annotation: The start of a CDR2 sequence is defined as the 14th residue followed by the “W[*]R” motif. Once the first residue is identified, motif “RF” which is localized between Nb residue 63-residue 72 was then identified, and the end of the CDR2 sequence as the 8th residue preceding the “RF” motif was defined.

[0158] CDR3 annotation: The motif of “Y[*]C” or “YY[*]” was first searched, which is localized between Nb residue 90-residue 105. The start of a CDR3 sequence is defined as the 3rd residue followed by the “Y[*]C” or “YY[*]” motif. Once the first residue of a CDR3 was identified, either one of the following sequence motifs (“WG[*]G”, “WGQ[*]”, “W[*]Q[*]”, “[*]GQG”, “[*][*]GQ” and “WG[*][*]”) was then used to locate the end of the CDR3. These motifs are located within the last 14 residues of the C terminal Nb sequence. CDR3 ends at 1 residue ahead of the sequence motif. More information can be found in the Augur Llama scripts.
[0159] The cleavage rules for in-silico digestion of Nbs by different proteases:
[0160] Trypsin: C-terminal to K/R, not followed by P
[0161] Chymotrypsin: C-terminal to W/F/UY, not followed by P
[0162] GluC: C-terminal to D/E, not followed by P
[0163] AspN: N-terminal to D
[0164] LysC: C-terminal to K

[0165] Sequence alignment of Nb database: Nb sequences were aligned using the software ANARCI (Dunbar, J. & Deane, C. M, 2016). Three CDRs (CDR 1-CDR3) and four Framework sequences (FR1-FR4) were annotated according to IMGT numbering scheme (Lefranc, 2003). Alignments below the threshold e-value of 100 were removed and the remaining sequences were plotted by WebLogo (Crooks, 2004).

[0166] In-silico digestion of Nb database by different proteases and analysis of Nb CDR3 mapping. A high-quality database containing approximately 0.5 million unique Nb sequences was in-silico digested using different enzymes including trypsin, chymotrypsin, LysC, GluC, and AspN according to the above cleavage rules. CDR3 containing peptides were obtained to calculate the sequence coverages. The CDR3 coverages were then summed to generate FIGS. 1D & 7B. The CDR3 peptide length distributions (by trypsin and chymotrypsin) were plotted to generate FIG. 1E.

[0167] Simulation of trypsin and chymotrypsin-aided MS mapping of Nbs. 10,000 Nb sequences with unique CDR3 fingerprint sequences were randomly selected from the database. The selected Nbs were then in-silico digested by either trypsin or chymotrypsin (with no-miscleavage sites allowed) to generate CDR3 peptides. The following criteria were applied to these peptides to better simulate Nb identifications by MS: 1) peptides of favorable sizes for bottom-up proteomics (between 850-3,000 Da) were first selected. 2) Peptides containing the highly conserved C-terminal FR4 motif of WGQGQVTS were further discarded. Based on our observations, such peptides are often dominated by C terminal y ion fragmentations, while having poorly fragmented ions on the CDR3 sequence which are essential for unambiguous CDR3 peptide identifications. 3) CDR3 peptides with limited Nb fingerprint information (containing less than 30% CDR3 sequence coverage) were removed. As a result, 2,111 unique tryptic peptides and 5,154 unique chymotryptic peptides were obtained. These peptides were then used to map Nb proteins. After protein assembly, only Nb identifications with sufficiently high CDR3 fingerprint sequence coverages (>60%) were used to generate the venn diagram in FIG. 1F.

[0168] Phylogenetic analysis of Nb CDR3 sequences. Phylogenetic trees were generated by Clustal Omega (Sievers, 2014) with the input of unique Nb CDR3 sequences and the additional flanking sequences (i.e., YYCAA to the N-term and WGQG to the C-term of CDR3 sequences) to assist alignments. The data was plotted by ITo1 (Interactive Tree of Life) (Letunic, I. & Bork, P, 2007). Isoelectric points and hydrophobicities of Nb CDR3s were calculated using the BioPython library. Sequence alignments were visualized by Jalview (Waterhouse, 2009).

[0169] Evaluation of the reproducibility of Nb peptide quantification. Shared peptide identifications among different LC runs were used to evaluate the reproducibility of the label-free quantification method. For a typical 90 min LC gradient, the peptide peak width or full width at half maximum (FWHM) in general was less than 5s. The differences of peptide retention time among different LC runs were calculated to generate the kernel density estimation plots in FIG. 3B. Peptide retention times from different LC runs were used to calculate pearson correlation and were plotted in FIG. 9B.

[0170] Sequence alignment and analysis of HSA and Llama serum albumin. Llama (Camelus Ferus) serum albumin sequence was fetched and aligned with HSA by tblastn (NCBI). The isoelectric point (pI) and hydropathy values for individual amino acids were obtained online from (www.peptide2.com/N_peptide_hydrophobicity_hydrophilicity.php). These values were normalized between 0 to 1.0 and the sequence variations between the two albumins were calculated for each aligned position (the pairwise differences of pI and hydropathy). For a specific aligned residue position, a value of 0 indicates identical residues were found between the two sequences, while 1.0 indicates the largest sequence variation, such as a charge reversion from the negatively charged residue glutamic acid 400 for HSA to the positively charged residue arginine at the corresponding aligned position for camelid albumin. A value of 0.5 was assigned at the position where an insertion or deletion of amino acid was identified. Sequence variations of both pI and hydropathy between HSA and Llama serum albumin were thus plotted. The plots were further smoothed by a gaussian function to generate FIG. 4A.

[0171] Analysis of relative abundance of amino acids on Nb CDRs. The amino acid frequencies at each CDR (including CDR1, CDR2 and CDR3 head) were calculated and normalized to generate the bar plots and the pie plots in FIGS. 6, 7, 12 and 13. CDR3 head sequences were obtained by removing the semi-conserved C terminal four residues of CDR3s. The CDR residue frequencies of both high-affinity and low-affinity Nbs were normalized based on the sum of the CDR residues of each affinity group.

[0172] Analysis of amino acid positions on CDR3 heads. The relative position of a residue on a CDR3 head was calculated where a value of 0 indicates the very N terminus of a CDR3 head while 1.0 indicates the last residue. The CDR3 head sequences were then sliced into 20 bins with a bin width of 0.05. Within each bin, the occurrence of a specific type of amino acid (such as tyrosine, glycine, or serine) was counted and normalized to the sum of residues on CDR3 heads. The distributions of different amino acids including their relative positions and abundances were plotted in FIGS. 5H and 12G.

[0173] Proteomics database search of Nb peptide candidates. Raw MS data was searched by Sequest HT embedded in the Proteome Discoverer 2.1 (Thermo Fisher) against an in-house generated Nb sequence database using the standard target-decoy strategy for FDR estimation. The mass accuracy was specified as 10 ppm and 0.02 Da for MS1 and MS2, respectively. Other search parameters included cysteine carbamidomethylation as a fixed modification and methionine oxidation as a variable modification. A maximum of one or two missed-cleavage sites was allowed for trypsin and chymotrypsin-processed samples respectively. The initial search results were filtered by percolator with the FDR of 0.01 (strict) based on the q-value (Kall, 2007). After database search, the peptide-spectrum-matches (PSMs) were exported, processed and analyzed by Augur Llama with following steps:

[0174] a. Nanobody Identification

[0175] i) Quality Assessment of CDR3 Fingerprints

[0176] Peptide candidates were first annotated as either CDR or FR peptides. To confidently identify CDR3 fingerprint peptides, we implemented a filter/algorithm requiring sufficient coverage of high-resolution CDR3 fragment ions in the PSMs (See illustration in FIG. 8B). The filter was evaluated using a target sequence database containing approximately 0.5 million unique Nb sequences and a non-overlapping decoy database of similar size. Target and decoy Nb sequence databases herein used were obtained from different llamas. Any peptide identification from the decoy database was considered as a false positive. The FDR was defined based on the % of peptide identifications from the decoy database compared with those from the target database. CDR3 length was also considered to enable development of a sensitive CDR3 peptide filter. The CDR3 fragmentation coverage was defined as the percentage of the CDR3 residues that were matched by fragment ions (either b ions or y ions) within the mass accuracy window. Spectra of the same peptide were combined for assessment. Only CDR3 peptides that passed this filter (5% FDR) were selected for the downstream Nb assembly.

[0177] ii) Nanobody Sequence Assembly

[0178] CDR peptides including the confident CDR3 peptides were used for Nb protein assemblies. Two additional criteria must be matched before a Nb can be identified. These include: 1) both CDR1 and CDR2 peptides must be available for a Nb assembly. 2) for any Nb identification, a minimum of 50% combined CDR coverage was mandated.

[0179] b. Quantification and Classification of Antigen-Specific Nb Repertoires

[0180] MS raw data was accessed by MSFileReader 3.1 SP4(ThermoFisher), and a python library of pymsfilereader (github.com/frallain/pymsfilereader). Reliable CDR3 peptides that passed the quality filter were quantified by label-free LC/MS.

[0181] i) CDR3 Peptide Quantification

[0182] To enable accurate label-free quantification of CDR3 peptide identification across different LC runs, different retention time windows for peptide peak extraction were specified. For peptides that can be directly identified by the search engine based on the MS/MS spectra, a small quantification window of +/−0.5 minutes retention time (RT) shift was used for peak extractions. For peptides that were not directly identified from a particular LC run (due to the complexity of peptides and stochastic ion sampling), their RTs were predicted based on the RT of the adjacent LC and were adjusted using the median RT difference of the commonly identified peptides between the two LC runs. In this case, a relaxed RT window of +/−2.0 minutes (for a typical 90 min LC gradient), in which approximately 95% of all the identified peptides can be matched between the two LC runs, was applied to facilitate extraction of the peptide peaks. Both m/z and z of a peptide were used for peak extractions with a mass accuracy window of +/−10 ppm. The peptide peaks were extracted and smoothed using a Gaussian function. Their AUCs (area under the curve) were calculated and AUCs from the replicated LC runs were averaged to infer the CDR3 peptide intensities.

[0183] ii) Classifications of Nbs

[0184] To enable accurate classifications e.g., based on Nb affinities, relative ion intensities (AUCs) of the CDR3 fingerprint peptides among three different biochemically fractionated Nb samples (F), F2 and F3) were quantified as I1, I2 and I3. Based on the quantification results, CDR3 peptides were arbitrarily classified into three clusters (C1, C2, and C3) using the following criteria:
[0185] 1) For C3 (high-affinity) cluster: I3>I1+I2 (indicating Nbs were more specific to F3)
[0186] 2) For C2 (mediocre-affinity) cluster: I2>I1+I3 (indicating Nbs were more specific to F2)
[0187] 3) For C1 (low-affinity) cluster:

[0188] I1>I2+I3 (indicating Nbs were either more specific to F) or likely nonspecific binders), alternatively, if I1<I2+I3 and I2<I1+I3 and I3<I1+I2, these Nb identifications were likely nonspecifically identified and were grouped into C1 as well. See illustration in FIG. 8C.

[0189] The above method was used to classify HSA and GST Nbs. Some modifications were made for quantification and characterization of high-affinity PDZ Nbs. Specifically, an additional control of MBP interacting Nbs “F_control” (ion intensity of I_control) was included for quantification. High-affinity cluster Nbs (represented by their unique CDR3 peptides) were defined when the sum intensities of I2 and I3 for a Nb CDR3 peptide were 20 fold higher than I_control(i.e. 20*I_control <I2+I3). For Nbs where more than one unique CDR3 peptide was used for quantification, classification results among different CDR3 peptides from the same Nb must be consistent; otherwise, they were removed before the final results were reported.

[0190] Heatmap analysis of the relative intensities of CDR3 peptides. The identified CDR3 peptides were quantified based on their relative MS1 ion intensities and were subsequently clustered using scripts in Augur Llama. Z-scores were calculated based on the relative ion intensities and were used to generate a heatmap in FIG. 3A for visualization.

[0191] Structural modeling of antigen-Nb complexes. Structural models for Nbs were obtained using a multi-template comparative modeling protocol of MODELLER (Webb, B. & Sali, A, 2014). Next, we refine the CDR3 loop and select the top 5 scoring loop conformations for the downstream docking. Each Nb model is then docked to the respective antigen by an antibody-antigen docking protocol of PatchDock software that focuses the search to the CDRs (Schneidman-Duhovny, 2005). The models are then re-scored by a statistical potential SOAP (Dong, 2013). The antigen interface residues (distance <XÅ from Nb atoms) among the 10 best scoring models according to the SOAP score were used to determine the epitopes. Once the epitopes were defined, we clustered Nbs based on the epitope similarity using k-means clustering. The clusters reveal the most immunogenic surface patches on the antigens. Antigen-Nb complexes with CXMS data were modeled by distance-restrained based PatchDock protocol that optimizes restraints satisfaction (Schneidman-Duhovny, 2020; Russel, 2012). A restraint was considered satisfied if the Ca-Ca distance between the cross-linked residues was within 25 Å and 20 Å for DSS and EDC cross-linkers, respectively (Shi, 2014; Fernandez-Martinez, 2016). In the case of ambiguous restraints, such as the GST dimer, it is required that one of the cross-links is satisfied.

[0192] Machine learning analysis of Nb repertoires. A deep neural network was trained to distinguish between low- and high-affinity Nbs that were characterized by the accurate high-pH fractionation method and quantitative proteomics. This model consists of one convolutional layer with batch normalization and ReLU activation function, followed by a max pooling layer ending with a fully connected layer to integrate the features extracted into the logits layer that leads to the classifier prediction. The convolutional layer consists of 20 1D filters, representing local receptive fields with window size of 7 amino acids, long enough to capture the relevant CDRs and short enough to avoid data overfitting. During the forward pass, each filter slides along the protein sequence with a fixed stride performing an elementwise multiplication with the current sequence window, followed by summing it up to generate a filter response. The classification accuracy of the model was 92%.

[0193] To understand the physicochemical features learned by the network for distinguishing low- and high-affinity binders, the activation path was calculated through the network back from the prediction to the activated filter. Similar to the backpropagation algorithm, backward was iterated from the last two layers of fully connected network, extracting for each sequence the output signal and looking for the highest peaks which contribute the most weight to the classification. In the same way, upstream the contribution of each filter to those peaks was calculated. In addition, filter activity in CDRs was analyzed to extract region-specific dominant filters. This process of network interpretation results in a unique contribution per filter per sequence. Each filter is activated along the sequence downsampled in the max pooling layer. For each filter, its highest peak was then picked leading to classification. Finally, the most contributing filters per sequence was determined and there also we got an interesting filter out with more than 30% contribution in those regions of interest.

### Computer Implemented Methods

[0194] It should be appreciated that the logical operations described herein with respect to the various figures may be implemented (1) as a sequence of computer implemented acts or program modules (i.e., software) running on a computing device (e.g., the computing device described in FIG. 14), (2) as interconnected machine logic circuits or circuit modules (i.e., hardware) within the computing device and/or (3) a combination of software and hardware of the computing device. Thus, the logical operations discussed herein are not limited to any specific combination of hardware and software. The implementation is a matter of choice dependent on the performance and other requirements of the computing device. Accordingly, the logical operations described herein are referred to variously as operations, structural devices, acts, or modules. These operations, structural devices, acts and modules may be implemented in software, in firmware, in special purpose digital logic, and any combination thereof. It should also be appreciated that more or fewer operations may be performed than shown in the figures and described herein. These operations may also be performed in a different order than those described herein.

[0195] Referring to FIG. 14, an example computing device 500 upon which the methods described herein may be implemented is illustrated. It should be understood that the example computing device 500 is only one example of a suitable computing environment upon which the methods described herein may be implemented. Optionally, the computing device 500 can be a well-known computing system including, but not limited to, personal computers, servers, handheld or laptop devices, multiprocessor systems, microprocessor-based systems, network personal computers (PCs), minicomputers, mainframe computers, embedded systems, and/or distributed computing environments including a plurality of any of the above systems or devices. Distributed computing environments enable remote computing devices, which are connected to a communication network or other data transmission medium, to perform various tasks. In the distributed computing environment, the program modules, applications, and other data may be stored on local and/or remote computer storage media.

[0196] In its most basic configuration, computing device 500 typically includes at least one processing unit 506 and system memory 504. Depending on the exact configuration and type of computing device, system memory 504 may be volatile (such as random access memory (RAM)), non-volatile (such as read-only memory (ROM), flash memory, etc.), or some combination of the two. This most basic configuration is illustrated in FIG. 14 by dashed line 502. The processing unit 506 may be a standard programmable processor that performs arithmetic and logic operations necessary for operation of the computing device 500. The computing device 500 may also include a bus or other communication mechanism for communicating information among various components of the computing device 500.

[0197] Computing device 500 may have additional features/functionality. For example, computing device 500 may include additional storage such as removable storage 508 and non-removable storage 510 including, but not limited to, magnetic or optical disks or tapes. Computing device 500 may also contain network connection(s) 516 that allow the device to communicate with other devices. Computing device 500 may also have input device(s) 514 such as a keyboard, mouse, touch screen, etc. Output device(s) 512 such as a display, speakers, printer, etc. may also be included. The additional devices may be connected to the bus in order to facilitate communication of data among the components of the computing device 500. All these devices are well known in the art and need not be discussed at length here.

[0198] The processing unit 506 may be configured to execute program code encoded in tangible, computer-readable media. Tangible, computer-readable media refers to any media that is capable of providing data that causes the computing device 500 (i.e., a machine) to operate in a particular fashion. Various computer-readable media may be utilized to provide instructions to the processing unit 506 for execution. Example tangible, computer-readable media may include, but is not limited to, volatile media, non-volatile media, removable media and non-removable media implemented in any method or technology for storage of information such as computer readable instructions, data structures, program modules or other data. System memory 504, removable storage 508, and non-removable storage 510 are all examples of tangible, computer storage media. Example tangible, computer-readable recording media include, but are not limited to, an integrated circuit (e.g., field-programmable gate array or application-specific IC), a hard disk, an optical disk, a magneto-optical disk, a floppy disk, a magnetic tape, a holographic storage medium, a solid-state device, RAM, ROM, electrically erasable program read-only memory (EEPROM), flash memory or other memory technology, CD-ROM, digital versatile disks (DVD) or other optical storage, magnetic cassettes, magnetic tape, magnetic disk storage or other magnetic storage devices.

[0199] In an example implementation, the processing unit 506 may execute program code stored in the system memory 504. For example, the bus may carry data to the system memory 504, from which the processing unit 506 receives and executes instructions. The data received by the system memory 504 may optionally be stored on the removable storage 508 or the non-removable storage 510 before or after execution by the processing unit 506.

[0200] It should be understood that the various techniques described herein may be implemented in connection with hardware or software or, where appropriate, with a combination thereof. Thus, the methods and apparatuses of the presently disclosed subject matter, or certain aspects or portions thereof, may take the form of program code (i.e., instructions) embodied in tangible media, such as floppy diskettes, CD-ROMs, hard drives, or any other machine-readable storage medium wherein, when the program code is loaded into and executed by a machine, such as a computing device, the machine becomes an apparatus for practicing the presently disclosed subject matter. In the case of program code execution on programmable computers, the computing device generally includes a processor, a storage medium readable by the processor (including volatile and non-volatile memory and/or storage elements), at least one input device, and at least one output device. One or more programs may implement or utilize the processes described in connection with the presently disclosed subject matter, e.g., through the use of an application programming interface (API), reusable controls, or the like. Such programs may be implemented in a high level procedural or object-oriented programming language to communicate with a computer system. However, the program(s) can be implemented in assembly or machine language, if desired. In any case, the language may be a compiled or interpreted language and it may be combined with hardware implementations.

[0201] As noted above, logical operations described herein, for example logical operations as described in Example 8, can be implemented with hardware, software or, where appropriate, with a combination thereof. For example, the logical operations can be implemented using one or more computing devices such as computing device 500 of FIG. 14. Logical operations described in Example 8 include, but are not limited to, methods for determining antigen affinity of nanobody peptide sequences, methods for training deep learning models, and deep learning-based methods for inferring antigen affinity of nanobody peptide sequences. These operations are described in detail above.

[0202] In some embodiments, a computer-implemented method includes:

[0203] receiving a nanobody peptide sequence;

[0204] identifying a plurality of CDR regions of the nanobody peptide sequence, the CDR regions including CDR3 regions;

[0205] applying a fragmentation filter to discard one or more false positive CDR3 regions of the nanobody peptide sequence;

[0206] quantifying an abundance of one or more non-discarded CDR3 regions of the nanobody peptide sequence; and

[0207] inferring an antigen affinity based on the quantified abundance of the one or more non-discarded CDR3 regions of the nanobody peptide sequence.

[0208] In some embodiments, a method for training a deep learning model includes:

[0209] creating a dataset that comprises a plurality of nanobody peptide sequences and corresponding antigen-affinity labels; and

[0210] training, using the dataset, a deep learning model to classify nanobody peptide sequences having low antigen affinity and nanobody peptide sequences having high antigen affinity.

[0211] In some embodiments, a method for determining antigen affinity of nanobody peptide sequences includes:

[0212] receiving a nanobody peptide sequence;

[0213] inputting the nanobody peptide sequence into a trained deep learning model; and

[0214] classifying, using the trained deep learning model, the nanobody peptide sequence as having low antigen affinity or high antigen affinity.

TABLE 1
Summary of GST Nbs and their biophysical and physiochemical properties

| | | | | | | | | Binder | | | | | |
|---|---|---|---|---|---|---|---|---|---|---|---|---|---|
| | | | | | | | | by | | | | | |
| | | | | | | | | Beads- | ELISA | | | | |
| | | | | | | | | binding | affinity | | | | |
| | | | SEQ ID | Salt | LowpH | HighpH | | Assay | (LogIC50 | SPR ka | SPR kd | SPR KD | Cross- |
| ID | Enzyme | Protein Sequence | NO | Trend | Trend | Trend | Soluble | (FIG. S3C) | (oD450nm)) | (1/Ms) | (1/s) | (M) | linker |
| G1 | Chymo | MASMTGGQQMGRNSAQ | SEQ ID | 0 | 0 | 2 | Yes | / | 2.93 | / | | | / |
| | | VQLVESGGGLVQAGGSL | NO: 1 | | | | | | | | | | |
| | | RLSCAAPGSTFSTNIIAW | | | | | | | | | | | |
| | | YRQPPGKQRELVAAIGG | | | | | | | | | | | |
| | | PGSTNYADSVKGRFTISR | | | | | | | | | | | |
| | | DNAKNTGYLQMKSLKP | | | | | | | | | | | |
| | | DDTAVYYCNMVTQRGN | | | | | | | | | | | |
| | | EYWGQGTQVTVSSEPKT | | | | | | | | | | | |
| | | PKGGCGGGLEHHHHHH | | | | | | | | | | | |
| G2 | Trypsin/ | MASMTGGQQMGRNSAE | SEQ ID | / | 1 | 0 | Yes | / | 2.667 | 1.02E+03 | 2.04E−03 | 2.00E−06 | / |
| | Chymo | VQLVESGGDLVQAGGSL | NO: 2 | | | | | | | | | | |
| | | RLSCSASGNIFKINDMG | | | | | | | | | | | |
| | | WYRQAPGKQRELVARIS | | | | | | | | | | | |
| | | SSGNTNYADSVKGRFTIS | | | | | | | | | | | |
| | | RDNGKNTVYLQMNRVK | | | | | | | | | | | |
| | | PEDTAVYYCNADVQVS | | | | | | | | | | | |
| | | RNYEYEYWGQGTQVTV | | | | | | | | | | | |
| | | SSEPKTPKGGCGGGLEH | | | | | | | | | | | |
| | | HHHHH | | | | | | | | | | | |
| G3 | Trypsin | MASMTGGQQMGRNSAQ | SEQ ID | / | / | 0 | Yes | Yes | / | / | | | / |
| | | VQLVESGGGLVQAGGSL | NO: 3 | | | | | | | | | | |
| | | RLSCAASAGTFSTYAISW | | | | | | | | | | | |
| | | FRQAPGKERDFVAAINRI | | | | | | | | | | | |
| | | SRSAYSPYYADSVKGRF | | | | | | | | | | | |
| | | TISEDNAKNTVNLQMNS | | | | | | | | | | | |
| | | LKPEDTAVYYCAAGSIF | | | | | | | | | | | |
| | | HTDVRYYAYWARGPRS | | | | | | | | | | | |
| | | PSSEPKTPKGGCGGGLE | | | | | | | | | | | |
| | | HHHHHH | | | | | | | | | | | |
| G4 | Trypsin/ | MASMTGGQQMGRNSAE | SEQ ID | / | 0 | / | Yes | Yes | / | / | | | / |
| | Chymo | VQLVESGGGLVQPGGSL | NO: 4 | | | | | | | | | | |
| | | RLSCSASGRTLDSYGIG | | | | | | | | | | | |
| | | WFRQAPGKEREEVSCISS | | | | | | | | | | | |
| | | SGGNADYADSVMGRFTI | | | | | | | | | | | |
| | | SRDNAKNTVYLHMNNL | | | | | | | | | | | |
| | | RPEDTAVYYCAAIAGLC | | | | | | | | | | | |
| | | ALHYTDYKVVVIPGSWG | | | | | | | | | | | |
| | | QGTQVTVSSEPKTPKGG | | | | | | | | | | | |
| | | CGGGLEHHHHHH | | | | | | | | | | | |
| G5 | Trypsin | MASMTGGQQMGRNSAE | SEQ ID | / | 0 | 0 | Yes | / | 0, No | / | | | / |
| | | VQLVESGGGVVQPGGSL | NO: 5 | | | | | | binding | | | | |
| | | TLSCAASGFAFRNYAMS | | | | | | | | | | | |
| | | WVRQAPGKGPEWVSQI | | | | | | | | | | | |
| | | NGRGGYTSYADSVKGRF | | | | | | | | | | | |
| | | TISRDNTKNTLYLQMNN | | | | | | | | | | | |
| | | LKPDDTAVYYCAKDPTQ | | | | | | | | | | | |
| | | LRWIPVPNYILGSTKGQG | | | | | | | | | | | |
| | | TQVTVSSEPKTPKGGCG | | | | | | | | | | | |
| | | GGLEHHHHHH | | | | | | | | | | | |
| G6 | Chymo | MASMTGGQQMGRNSAQ | SEQ ID | / | / | 0 | Yes | / | 0, No | / | | | / |
| | | VQLVESGGGLVQAGGSL | NO: 6 | | | | | | binding | | | | |
| | | RLSCAASGRTISSYAMG | | | | | | | | | | | |
| | | WFRQAPGKERELVARIT | | | | | | | | | | | |
| | | SSAGSTYYADSVKGRFTI | | | | | | | | | | | |
| | | SRDNAKNTMYLQMNSL | | | | | | | | | | | |
| | | KPEDTAVYYCAVEIVRA | | | | | | | | | | | |
| | | QYDYWGQGTQVTVSSE | | | | | | | | | | | |
| | | PKTPKGGCGGGLEHHHH | | | | | | | | | | | |
| | | HH | | | | | | | | | | | |
| G7 | Chymo | MASMTGGQQMGRNSAQ | SEQ ID | / | / | 0 | Yes | Yes | 1.885 | 3.02E+03 | 8.09E−04 | 2.68E−07 | / |
| | | VQLVESGGGLVQPGDSL | NO: 7 | | | | | | | | | | |
| | | RLSCAVSGQYVNMAAM | | | | | | | | | | | |
| | | GWFRQAPGKEREFVAGI | | | | | | | | | | | |
| | | SWSDDTDIADSVKGRFTI | | | | | | | | | | | |
| | | SRDHGKNTVDLQMNSL | | | | | | | | | | | |
| | | KPEDTGVYLCAGRFRRL | | | | | | | | | | | |
| | | AKDFGEYDYWGQGTQV | | | | | | | | | | | |
| | | TVSSEPKTPKGGCGGGL | | | | | | | | | | | |
| | | EHHHHHH | | | | | | | | | | | |
| G8 | Trypsin | MASMTGGQQMGRNSAQ | SEQ ID | 1 | 0 | 1 | Yes | / | 4.658 | / | | | / |
| | | VQLVESGGGLVQAGGSL | NO: 8 | | | | | | | | | | |
| | | RLSCAASGITSSIASMGW | | | | | | | | | | | |
| | | FRQAPGKEEEFVARIRW | | | | | | | | | | | |
| | | NTDNTYYADSVKGRFTI | | | | | | | | | | | |
| | | SRDNAQNTVYLQMNRL | | | | | | | | | | | |
| | | KPEDTAVYYCVARRGW | | | | | | | | | | | |
| | | SDLLYDYRGQGTQVTVS | | | | | | | | | | | |
| | | SEPKTPKGGCGGGLEHH | | | | | | | | | | | |
| | | HHHH | | | | | | | | | | | |
| G9 | Trypsin | MASMTGGQQMGRNSAD | SEQ ID | 1 | / | 2 | Yes | Yes | 8.05 | 2.00E+06 | 3.53E−04 | 1.77E−10 | DSS |
| | | VQLVESGGGLVQPGGSL | NO: 9 | | | | | | | | | | |
| | | RLSCAASGLTLDNYDMA | | | | | | | | | | | |
| | | WFRQAPGKEREFVTAIN | | | | | | | | | | | |
| | | YVGGRTYADSVRGRFTI | | | | | | | | | | | |
| | | SRDDTKNTVYLQMNSL | | | | | | | | | | | |
| | | KPEDTAVYYCAAGLQY | | | | | | | | | | | |
| | | GITSLRTRNYNYWGQGT | | | | | | | | | | | |
| | | QVTVSSEPKTPKGGCGG | | | | | | | | | | | |
| | | GLEHHHHHH | | | | | | | | | | | |
| G10 | Trypsin | MASMTGGQQMGRNSAQ | SEQ ID | / | / | 2 | No | / | / | / | | | / |
| | | VQLVESGGGLVQAGGSL | NO: 10 | | | | | | | | | | |
| | | RLSCAASGSIFSINSMGW | | | | | | | | | | | |
| | | YRQAPGIERELVAHMPT | | | | | | | | | | | |
| | | GGNTNYLDSVKGRFVIS | | | | | | | | | | | |
| | | RDDDKKTVYLQMNSLT | | | | | | | | | | | |
| | | PEDTAVYYCHAVITTVG | | | | | | | | | | | |
| | | RTGVRTYSYWARGPRSP | | | | | | | | | | | |
| | | SSEPKTPKGGCGGGLEH | | | | | | | | | | | |
| | | HHHHH | | | | | | | | | | | |
| G11 | Trypsin/ | MASMTGGQQMGRNSAQ | SEQ ID | / | 0 | / | No | / | / | / | | | / |
| | Chymo | VQLVESGGGLVQAGGSL | NO: 11 | | | | | | | | | | |
| | | RLSCAASGRTFNSGILG | | | | | | | | | | | |
| | | WFRQAPGKDREFVAAIG | | | | | | | | | | | |
| | | WSAGSTYYSDSVKGRFT | | | | | | | | | | | |
| | | ISRDITKNTVFLQMNSLK | | | | | | | | | | | |
| | | PEDTAVYYCADKKYYY | | | | | | | | | | | |
| | | GREASSNVYEYWGQGT | | | | | | | | | | | |
| | | QVTVSSEPKTPKGGCGG | | | | | | | | | | | |
| | | GLEHHHHHH | | | | | | | | | | | |
| G12 | Chymo | MASMTGGQQMGRNSAQ | SEQ ID | 1 | 0 | 2 | Yes | / | 4.207 | / | | | DSS |
| | | VQLVESGGGLVQAGGSL | NO: 12 | | | | | | | | | | |
| | | RLSCAASRSTFRINAAG | | | | | | | | | | | |
| | | WYRQAPGKERELVARIS | | | | | | | | | | | |
| | | SGGSTNYADSVKGRFTIS | | | | | | | | | | | |
| | | RDNAKNTVYLQMNSLK | | | | | | | | | | | |
| | | PEDTAVYYCNVPYYRED | | | | | | | | | | | |
| | | GYEYDAWGQGTQVTVS | | | | | | | | | | | |
| | | SEPKTPKGGCGGGLEHH | | | | | | | | | | | |
| | | HHHH | | | | | | | | | | | EDC |
| G13 | Chymo | MASMTGGQQMGRNSAD | SEQ ID | / | / | 2.00E+00 | Yes | Yes | 6.735 | 4.74E+05 | 1.70E−04 | 3.60E−10 | DSS |
| | | VQLVESGGGVVQAGGSL | NO: 13 | | | | | | | | | | |
| | | RLSCAASGRTFSDYAMG | | | | | | | | | | | |
| | | WFRQAPGKEREFVAGVS | | | | | | | | | | | |
| | | WSGVDTYYADSVKGRF | | | | | | | | | | | |
| | | TISRDNAKNTLYVQMNS | | | | | | | | | | | |
| | | LKPEDTAVYYCAAQRY | | | | | | | | | | | |
| | | YHGHAKNMRYDYWGQ | | | | | | | | | | | |
| | | GTQVTVSSEPKTPKGGC | | | | | | | | | | | |
| | | GGGLEHHHHHH | | | | | | | | | | | |
| G14 | Chymo | MASMTGGQQMGRNSAE | SEQ ID | 2 | 0 | 2 | Yes | / | 5.274 | / | | | DSS |
| | | VQLVESGGGLVQAGGSL | NO: 14 | | | | | | | | | | |
| | | RLSCAASGSTFDTNPIGW | | | | | | | | | | | |
| | | YRQAPGKQRDLVAMITS | | | | | | | | | | | |
| | | GGHTNYADSVKGRFTIS | | | | | | | | | | | |
| | | RDNAKNTVYLQMNSLK | | | | | | | | | | | |
| | | PEDTAVYYCTVPHYRED | | | | | | | | | | | |
| | | GYEYHFWGQGTQVTVS | | | | | | | | | | | |
| | | SEPKTPKGGCGGGLEHH | | | | | | | | | | | |
| | | HHHH | | | | | | | | | | | |
| | | | | | | | | | | | | | EDC |
| G15 | Chymo | MASMTGGQQMGRNSAQ | SEQ ID | 2 | 0 | 2 | Yes | Yes | 4.606 | / | | | / |
| | | VQLVESGGGLVQAGGSL | NO: 15 | | | | | | | | | | |
| | | RLSCAASGSTFDTNPIGW | | | | | | | | | | | |
| | | YRQAPGKQRDLVAMITS | | | | | | | | | | | |
| | | GGHTNYADSVKGRFTIS | | | | | | | | | | | |
| | | RDNAKNTVYLQMNSLK | | | | | | | | | | | |
| | | PEDTAVYYCTVPHYRED | | | | | | | | | | | |
| | | GYEYHCWGQGTQVTVS | | | | | | | | | | | |
| | | SEPKTPKGGCGGGLEHH | | | | | | | | | | | |
| | | HHHH | | | | | | | | | | | |
| G16 | Cyhmo | MASMTGGQQMGRNSAE | SEQ ID | 2 | 1 | / | Yes | / | 5.684 | / | | | / |
| | | VQLVESGGGLVQPGGSL | NO: 16 | | | | | | | | | | |
| | | RLSCAASGSTFSINAIGW | | | | | | | | | | | |
| | | YRQAPGKEREFVAALR | | | | | | | | | | | |
| | | WPGNIWYYADFVEGRIT | | | | | | | | | | | |
| | | ISRDNAKNTVYLQMNSL | | | | | | | | | | | |
| | | KPEDTAVYYCAARPENR | | | | | | | | | | | |
| | | GSYRDAATYDFWGQGT | | | | | | | | | | | |
| | | QVTVSSEPKTPKGGCGG | | | | | | | | | | | |
| | | GLEHHHHHH | | | | | | | | | | | |
| G17 | Chymo | MASMTGGQQMGRNSAE | SEQ ID | 2 | 2 | 2 | Yes | Yes | 9.81 | 1.34E+06 | 2.92E−05 | 2.17E−11 | / |
| | | VQLVESGGGLVQAGGSL | NO: 17 | | | | | | | | | | |
| | | RLSCAASGVTISYWVMG | | | | | | | | | | | |
| | | WFRQAPGKEREFVARIS | | | | | | | | | | | |
| | | WGGERTYYADSVKGRF | | | | | | | | | | | |
| | | AISRDNAKNTVYLQMNS | | | | | | | | | | | |
| | | LNAEDTAVYYCAADRT | | | | | | | | | | | |
| | | GWGHSNSRSEYDYWGQ | | | | | | | | | | | |
| | | GTQVTVSSEPKTPKGGC | | | | | | | | | | | |
| | | GGGLEHHHHHH | | | | | | | | | | | |
| G18 | Trypsin/ | MASMTGGQQMGRNSAQ | SEQ ID | / | 0 | / | Yes | Yes | / | / | | | / |
| | Chymo | VQLVESGGGLVQAGASL | NO: 18 | | | | | | | | | | |
| | | RLTCGPSGRSVGLYTMG | | | | | | | | | | | |
| | | WFRQAPGKEREFVAGVT | | | | | | | | | | | |
| | | YLGDTTTYSDAVKGRFT | | | | | | | | | | | |
| | | ISRENNKNTVYLRMNSL | | | | | | | | | | | |
| | | KPEDTAVYYCTATATG | | | | | | | | | | | |
| | | WGSPIPSAPGRWDYWG | | | | | | | | | | | |
| | | QGTQVTVSSEPKTPKGG | | | | | | | | | | | |
| | | CGGGLEHHHHHH | | | | | | | | | | | |
| G19 | Trypsin/ | MASMTGGQQMGRNSAQ | SEQ ID | 1 | 0 | 1 | Yes | / | 9 | / | | | / |
| | Chymo | VQLVESGGGLVQAGGSL | NO: 19 | | | | | | | | | | |
| | | RLSCAASGSTFSTNAVD | | | | | | | | | | | |
| | | WYRQAPGNQRDLVATIT | | | | | | | | | | | |
| | | SGGHTNYADSVKGRFTI | | | | | | | | | | | |
| | | SRDNAKNTVYLQMNSL | | | | | | | | | | | |
| | | KPEDTAVYYCAVPHYRE | | | | | | | | | | | |
| | | DGYEYRFWGQGTQVTV | | | | | | | | | | | |
| | | SSEPKTPKGGCGGGLEH | | | | | | | | | | | |
| | | HHHHH | | | | | | | | | | | |
| G20 | Trypsin | MASMTGGQQMGRNSAD | SEQ ID | 1 | / | / | Yes | / | 2.434 | / | | | / |
| | | VQLVESGGGLVQAGGSL | NO: 20 | | | | | | | | | | |
| | | RLSCAASERTFSRYMLG | | | | | | | | | | | |
| | | WFRQAPGKEREFVGVM | | | | | | | | | | | |
| | | GWSDSDTYYGDAVKGR | | | | | | | | | | | |
| | | FTISRDNVKNTIYLQMKS | | | | | | | | | | | |
| | | LKPEDTAVYYCAASAYG | | | | | | | | | | | |
| | | STRNHKLYEYWGQGTQ | | | | | | | | | | | |
| | | VTVSSEPKTPKGGCGGG | | | | | | | | | | | |
| | | LEHHHHHH | | | | | | | | | | | |
| G21 | Trypsin/ | MASMTGGQQMGRNSAD | SEQ ID | / | 0 | 2 | Yes | Yes | / | / | | | / |
| | Chymo | VQLVESGGGSVQAGGSL | NO: 21 | | | | | | | | | | |
| | | RLSCAASGRTFSNYAMA | | | | | | | | | | | |
| | | WFRQAPGKEREFVAAVS | | | | | | | | | | | |
| | | RSGTNLYYADSVKGRFT | | | | | | | | | | | |
| | | ISRDTAENTMYLQMNSL | | | | | | | | | | | |
| | | KPEDTAVYYCAAGLAER | | | | | | | | | | | |
| | | WGIGVQPRSEFLTTGAR | | | | | | | | | | | |
| | | GPRSPSSEPKTPKGGCGG | | | | | | | | | | | |
| | | GLEHHHHHH | | | | | | | | | | | |
| G22 | Trypsin | MASMTGGQQMGRNSAQ | SEQ ID | 1 | / | 1 | Yes | / | 2.071 | 3.09E+04 | 1.25E−03 | 4.05E−08 | / |
| | | VQLVESGGGSVQAGGSL | NO: 22 | | | | | | | | | | |
| | | RLSCAASGRTFSSYSMA | | | | | | | | | | | |
| | | WFRQAPGKEREFVAVM | | | | | | | | | | | |
| | | NCRYGDTDYPDSVKGRF | | | | | | | | | | | |
| | | TMSRDNAKNTLYLQMN | | | | | | | | | | | |
| | | SLKPEDTAVYYCAAKLI | | | | | | | | | | | |
| | | AYCGSGYYYRRNDYGY | | | | | | | | | | | |
| | | WGQGTQVTVSSEPKTPK | | | | | | | | | | | |
| | | GGCGGGLEHHHHHH | | | | | | | | | | | |
| G23 | Trypsin | MASMTGGQQMGRNSAQ | SEQ ID | 1 | / | / | Yes | / | 2.543 | / | | | / |
| | | VQLVESGGGLVQPGGSL | NO: 23 | | | | | | | | | | |
| | | RLSCAASGFTFSVNTMS | | | | | | | | | | | |
| | | WVRQAPGKGREWVSGI | | | | | | | | | | | |
| | | ESHGNTYYSDSVKGRFTI | | | | | | | | | | | |
| | | SRDNAKNTLYLQMNSL | | | | | | | | | | | |
| | | KPEDTAVYYCATGIYGT | | | | | | | | | | | |
| | | TRNWGQGTQVTVS SEPK | | | | | | | | | | | |
| | | TPKGGCGGGLEHHHHH | | | | | | | | | | | |
| | | H | | | | | | | | | | | |
| G24 | Chymo | MASMTGGQQMGRNSAQ | SEQ ID | 1 | 2 | 2 | Yes | Yes | / | / | | | / |
| | | VQLVESGGGLVQAGGTF | NO: 24 | | | | | | | | | | |
| | | GSYVMGWFRQPPGKER | | | | | | | | | | | |
| | | EFVSGIMWNGTSTSTNY | | | | | | | | | | | |
| | | ADSVKGRFTISRDNAKN | | | | | | | | | | | |
| | | TVFLQMNSLQPEDTAVY | | | | | | | | | | | |
| | | YCAASRSSALRTPVPLVE | | | | | | | | | | | |
| | | YWGQGTQVTVSSEPKTP | | | | | | | | | | | |
| | | KGGCGGGLEHHHHHH | | | | | | | | | | | |
| G25 | Trypsin/ | MASMTGGQQMGRNSAE | SEQ ID | 0 | 0 | 1 | Yes | / | 1.575 | / | | | / |
| | Chymo | VQLVESGGGLVQAGGSL | NO: 25 | | | | | | | | | | |
| | | RLSCAASGRTFSGRTFSD | | | | | | | | | | | |
| | | YPMAWFRQAPGKEREFL | | | | | | | | | | | |
| | | ATISTSGSRTYYADSVKG | | | | | | | | | | | |
| | | RFTISRDNAKDTVYLQM | | | | | | | | | | | |
| | | NSLKPEDAAIYYCAARQ | | | | | | | | | | | |
| | | GSYYSDYNRALPGEYDY | | | | | | | | | | | |
| | | WGQGTQVTVSSEPKTPK | | | | | | | | | | | |
| | | GGCGGGLEHHHHHH | | | | | | | | | | | |
| G26 | Chymo | MASMTGGQQMGRNSAQ | SEQ ID | / | / | 0 | Yes | Yes | / | / | | | / |
| | | VQLVESGGGLAQPGGSL | NO: 26 | | | | | | | | | | |
| | | RLSCAASGFTLDAYAIA | | | | | | | | | | | |
| | | WYRQAPGKDREEVACIS | | | | | | | | | | | |
| | | SSGDSTNYAESVKGRFTI | | | | | | | | | | | |
| | | SRDNAKKMGYLQMNSL | | | | | | | | | | | |
| | | KAEDTAIYYCAIDSRGC | | | | | | | | | | | |
| | | AWGGFAYYTFSHWGQG | | | | | | | | | | | |
| | | TQVTVSSEPKTPKGGCG | | | | | | | | | | | |
| | | GGLEHHHHHH | | | | | | | | | | | |
| G27 | Trypsin | MASMTGGQQMGRNSAD | SEQ ID | / | 1 | 0 | Yes | / | 1.365 | / | | | / |
| | | VQLVESGGDLVQAGGSL | NO: 27 | | | | | | | | | | |
| | | RLSCSASGNIFKINDMD | | | | | | | | | | | |
| | | WYRQAPGKQRELVARIS | | | | | | | | | | | |
| | | SSGSTNYADSVKGRFTIS | | | | | | | | | | | |
| | | RDNGKNTVYLQMNRVK | | | | | | | | | | | |
| | | PEDTAVYYCNADVQVS | | | | | | | | | | | |
| | | RNYEYEYWGQGTQVTV | | | | | | | | | | | |
| | | SSEPKTPKGGCGGGLEH | | | | | | | | | | | |
| | | HHHHH | | | | | | | | | | | |
| G28 | Chymo | MASMTGGQQMGRNSAQ | SEQ ID | / | 0 | 0 | Yes | Yes | / | / | | | / |
| | | VQLVESGGGLVQPRGSL | NO: 28 | | | | | | | | | | |
| | | RLSCAASGFTWGDYAIG | | | | | | | | | | | |
| | | WFRQAPGKEREGVSCLS | | | | | | | | | | | |
| | | SSDGSTYYPDSVKDRFTI | | | | | | | | | | | |
| | | STDNAKNTVYLQMTNL | | | | | | | | | | | |
| | | KPDDTAIYYCAAREGPG | | | | | | | | | | | |
| | | ASWYCSVNGYLTQPDS | | | | | | | | | | | |
| | | WGQGTQVTVSSEPKTPK | | | | | | | | | | | |
| | | GGCGGGLEHHHHHH | | | | | | | | | | | |
| G29 | Trypsin | MASMTGGQQMGRNSAQ | SEQ ID | 1 | 0 | 2 | Yes | / | 0, No | / | | | / |
| | | VQLVESGGGLVQAGDSL | NO: 29 | | | | | | binding | | | | |
| | | LLSCGTSGRTFSSNTMG | | | | | | | | | | | |
| | | WFRQAPGKGREFVATIT | | | | | | | | | | | |
| | | ASGRGTNYGDSVRGRFT | | | | | | | | | | | |
| | | ISRDNDKNTVYLQMNNL | | | | | | | | | | | |
| | | KPDDTGVYTCAASDSPY | | | | | | | | | | | |
| | | GSRWIEAYGYWGQGTQ | | | | | | | | | | | |
| | | VTVSSEPKTPKGGCGGG | | | | | | | | | | | |
| | | LEHHHHHH | SEQ ID | / | / | 1 | Yes | / | 4.86 | / | | | / |
| G30 | Chymo | MASMTGGQQMGRNSAQ | NO: 30 | | | | | | | | | | |
| | | VQLVESGGGLVQAGGSL | | | | | | | | | | | |
| | | RLSCAASGRTINNYDMG | | | | | | | | | | | |
| | | WFRQAPGKEREFVAAIT | | | | | | | | | | | |
| | | WSGRDTNYADSVKGRF | | | | | | | | | | | |
| | | TVSRDDAKNTVYLQMN | | | | | | | | | | | |
| | | TLSPEDTAVYYCASARIQ | | | | | | | | | | | |
| | | FYRLVAATRTDYSYWG | | | | | | | | | | | |
| | | QGTQVTVSSEPKTPKGG | | | | | | | | | | | |
| | | CGGGLEHHHHHH | | | | | | | | | | | |
| G31 | Trypsin/ | MASMTGGQQMGRNSAH | SEQ ID | 0 | 0 | 0 | Yes | Yes | / | / | | | / |
| | Chymo | VQLVESGGGLVQAGGSL | NO: 31 | | | | | | | | | | |
| | | RLSCKASESIFKFDAMA | | | | | | | | | | | |
| | | WFRQAPGKERELVACID | | | | | | | | | | | |
| | | NKQRTTYGDSVKGRFTI | | | | | | | | | | | |
| | | SGLDVKNTAYLEMNSLK | | | | | | | | | | | |
| | | PEDTAVYYCTADRSTCF | | | | | | | | | | | |
| | | SNYRLYDYWGQGTQVT | | | | | | | | | | | |
| | | VSSEPKTPKGGCGGGLE | | | | | | | | | | | |
| | | HHHHHH | | | | | | | | | | | |
| G32 | Chymo | MASMTGGQQMGRNSAQ | SEQ ID | / | / | 0 | Yes | / | 0, No | / | | | / |
| | | VQLVESGGGLVRAGDSL | NO: 32 | | | | | | binding | | | | |
| | | RLSCVVSGRPISSYAMA | | | | | | | | | | | |
| | | WFRQAPGKDREVVAGIS | | | | | | | | | | | |
| | | ANGDRTHYADSIKGRFT | | | | | | | | | | | |
| | | VSRDNAKNSMTLQMNK | | | | | | | | | | | |
| | | LKPEDTAVYYCAADSLT | | | | | | | | | | | |
| | | EGGYGLTGDFDYWGQG | | | | | | | | | | | |
| | | TQVTVSSEPKTPKGGCG | | | | | | | | | | | |
| | | GGLEHHHHHH | | | | | | | | | | | |
| G33 | Chymo | MASMTGGQQMGRNSAE | SEQ ID | 0 | 1 | 0 | Yes | / | 0, No | / | | | / |
| | | VQLVESGGSLRLSCSVS | NO: 33 | | | | | | binding | | | | |
| | | GGPFTSNGMGWYRQAP | | | | | | | | | | | |
| | | GKEREWVAAITNSGSAN | | | | | | | | | | | |
| | | YADSVKGRFTVSMVNA | | | | | | | | | | | |
| | | NNTMYLQMNNLKPDDT | | | | | | | | | | | |
| | | AVYYCNVAGWPHGYW | | | | | | | | | | | |
| | | GQGTQVTVSSEPKTPKG | | | | | | | | | | | |
| | | GCGGGLEHHHHHH | | | | | | | | | | | |
| G34 | Trypsin/ | MASMTGGQQMGRNSAQ | SEQ ID | / | / | 1 | Yes | Yes | 5.316 | 2.63E+04 | 4.62E−04 | 1.76E−08 | / |
| | Chymo | VQLVESGGGLVQAGDSL | NO: 34 | | | | | | | | | | |
| | | RLSCAASGRTFSRYAMA | | | | | | | | | | | |
| | | WFRQAPGKEREFVAGIS | | | | | | | | | | | |
| | | WTGRFTYYADSVKGRFT | | | | | | | | | | | |
| | | ISRDDAKNTVYLQMNNL | | | | | | | | | | | |
| | | KPEDTGLYFCKVGDPYG | | | | | | | | | | | |
| | | VGLREYEWWGPGTQVT | | | | | | | | | | | |
| | | VSSEPKTPKGGCGGGLE | | | | | | | | | | | |
| | | HHHHHH | | | | | | | | | | | |
| G35 | Chymo | MASMTGGQQMGRNSAQ | SEQ ID | / | 1 | / | Yes | Yes | / | / | | | / |
| | | VQLVESGGGLVQAGGSL | NO: 35 | | | | | | | | | | |
| | | RLSCAASGRTSRSFAMG | | | | | | | | | | | |
| | | WFRQAPGKGRDFVAAM | | | | | | | | | | | |
| | | TEFGTTYYADSVKGRFTI | | | | | | | | | | | |
| | | SRDNAKNTVYLQMNVL | | | | | | | | | | | |
| | | QSEDTAVYYCAAHWDN | | | | | | | | | | | |
| | | TQWYVYEVGGYEHWG | | | | | | | | | | | |
| | | QGTQVTVSSEPKTPKGG | | | | | | | | | | | |
| | | CGGGLEHHHHHH | | | | | | | | | | | |
| G36 | Trypsin/ | MASMTGGQQMGRNSAQ | SEQ ID | 2 | 0 | 0 | Yes | / | 0, No | / | | | / |
| | Chymo | VQLVESGGSLRLSCAAS | NO: 36 | | | | | | binding | | | | |
| | | GFALSNSYMKWVRQAP | | | | | | | | | | | |
| | | GKGPEWVSTIYADGSTY | | | | | | | | | | | |
| | | YTDSVKGRFITSRDNSK | | | | | | | | | | | |
| | | NTMYLQMSDLKPEDTA | | | | | | | | | | | |
| | | VYYCANPSAKGQGTQV | | | | | | | | | | | |
| | | TVSSEPKTPKGGCGGGL | | | | | | | | | | | |
| | | EHHHHHH | | | | | | | | | | | |
| G37 | Chymo | MASMTGGQQMGRNSAE | SEQ ID | / | 0 | / | Yes | / | 1.785 | / | | | / |
| | | VQLVESGGGLVQAGDSL | NO: 37 | | | | | | | | | | |
| | | RLSCVASGDTFTSYTVG | | | | | | | | | | | |
| | | WFRQAPGKEQEFVAGIS | | | | | | | | | | | |
| | | WSGRSTDYADFVKGRA | | | | | | | | | | | |
| | | TISKDIAKVSLQMNALKP | | | | | | | | | | | |
| | | EDTAVYSCAAKKVDWS | | | | | | | | | | | |
| | | SDYVTNYDYDYRGRGT | | | | | | | | | | | |
| | | QVTVSSEPKTPKGGCGG | | | | | | | | | | | |
| | | GLEHHHHHH | | | | | | | | | | | |
| G38 | Chymo | MASMTGGQQMGRNSAE | SEQ ID | / | 0 | / | Yes | / | 0, No | / | | | / |
| | | VQLVESGGGLVQAGGSL | NO: 38 | | | | | | binding | | | | |
| | | RLSCVASGHTDCISGMG | | | | | | | | | | | |
| | | WYRQAPGKERELVAVLI | | | | | | | | | | | |
| | | GGGNTYYGDSVKGRFTI | | | | | | | | | | | |
| | | SKDKAKNTLYLQMKTL | | | | | | | | | | | |
| | | KPEDMAVYYCTADDHG | | | | | | | | | | | |
| | | SECPNKEMSSTATYWGQ | | | | | | | | | | | |
| | | GTQVTVSSEPKTPKGGC | | | | | | | | | | | |
| | | GGGLEHHHHHH | | | | | | | | | | | |
| G39 | Trypsin/ | MASMTGGQQMGRNSAE | SEQ ID | 1 | / | 2 | Yes | / | 1.653 | / | | | / |
| | Chymo | VQLVESGGELVQSGSSL | NO: 39 | | | | | | | | | | |
| | | RLSCAASGFDLDDYAIG | | | | | | | | | | | |
| | | WFRQAPGKEREGVSCTS | | | | | | | | | | | |
| | | TSDGPTSYLDSVKGRFTF | | | | | | | | | | | |
| | | SRDNAKNTLYLQMNSL | | | | | | | | | | | |
| | | KPEDTAVYYCAAISHIFA | | | | | | | | | | | |
| | | EDAPAMGLCWDQRSAF | | | | | | | | | | | |
| | | WYWGQGTQVTVSSEPK | | | | | | | | | | | |
| | | TPKGGCGGGLEHHHHH | | | | | | | | | | | |
| | | H | | | | | | | | | | | |
| G40 | Chymo | MASMTGGQQMGRNSAE | SEQ ID | 1 | 0 | 0 | Yes | Yes | / | / | | | / |
| | | VQLVESGGGLVQPGGSL | NO: 40 | | | | | | | | | | |
| | | TLSCAASGFHLDNTAIA | | | | | | | | | | | |
| | | WFRQAPGKEREGVSCLS | | | | | | | | | | | |
| | | SRDGSTFYQYSLKDRFTI | | | | | | | | | | | |
| | | SGDNAKNTVYLQMKGL | | | | | | | | | | | |
| | | KPEDTATYYCAAALGID | | | | | | | | | | | |
| | | SQRTVIAGCPKRYFAAW | | | | | | | | | | | |
| | | GQGTQVTVSSEPKTPKG | | | | | | | | | | | |
| | | GCGGGLEHHHHHH | | | | | | | | | | | |
| G41 | Chymo | MASMTGGQQMGRNSAD | SEQ ID | 1 | 0 | 1 | Yes | / | 1.02 | / | | | / |
| | | VQLVESGGGLVQAGGSL | NO: 41 | | | | | | | | | | |
| | | RLSCVASGHTVSNYAM | | | | | | | | | | | |
| | | AWFRQAPGKEREFVAGI | | | | | | | | | | | |
| | | SWRASITYYRDSVKGRF | | | | | | | | | | | |
| | | TISRDNAKNTVYLQMSS | | | | | | | | | | | |
| | | LKPEDTAVYYCASDKTH | | | | | | | | | | | |
| | | YVSRGTSLVEYDYWGQ | | | | | | | | | | | |
| | | GTQVTVSSEPKTPKGGC | | | | | | | | | | | |
| | | GGGLEHHHHHH | | | | | | | | | | | |
| G42 | Trypsin/ | MASMTGGQQMGRNSAH | SEQ ID | 1 | 0 | 2 | Yes | / | 2.63 | / | / | / | / |
| | Chymo | VQLVESGGGFVQAGGSL | NO: 42 | | | | | | | | | | |
| | | RLSCEASGRTFNVYTMG | | | | | | | | | | | |
| | | WFRQAPGKEREFVGSIS | | | | | | | | | | | |
| | | WNGGSTYYADSVKGRF | | | | | | | | | | | |
| | | TISRDNAKNTVYLQMNS | | | | | | | | | | | |
| | | LEPEDTAVYYCAARRQS | | | | | | | | | | | |
| | | HLRLDLSVIDAWGKGTQ | | | | | | | | | | | |
| | | VTVSSEPKTPKGGCGGG | | | | | | | | | | | |
| | | LEHHHHHH | | | | | | | | | | | |
| G43 | Chymo | MASMTGGQQMGRNSAE | SEQ ID | / | 2 | 2 | Yes | / | 4.32 | / | / | / | / |
| | | VQLVESGGGLVQAGGSL | NO: 43 | | | | | | | | | | |
| | | RLSCATSGRTSSTYAMG | | | | | | | | | | | |
| | | WFRQRPGKEREFVATIH | | | | | | | | | | | |
| | | WGVGSTIYADSVKGRFT | | | | | | | | | | | |
| | | LSRDNAQNTVYLQMNS | | | | | | | | | | | |
| | | LKPEDTAVYYCAASTYR | | | | | | | | | | | |
| | | IGSYDVSTSQGYNYWGQ | | | | | | | | | | | |
| | | GTQVTVSSEPKTPKGGC | | | | | | | | | | | |
| | | GGGLEHHHHHH | | | | | | | | | | | |
| G44 | Chymo | MASMTGGQQMGRNSAD | SEQ ID | / | 2 | / | Yes | / | 3.058 | / | | | DSS |
| | | VQLVESGGGLVQAGGSL | NO: 44 | | | | | | | | | | |
| | | RLSCVASGPIFSFSTGGW | | | | | | | | | | | |
| | | YRQAPGKQRELVAALTG | | | | | | | | | | | |
| | | GGNTNYADSVKGRFTIS | | | | | | | | | | | |
| | | RDNAKNTVYLQMNLLK | | | | | | | | | | | |
| | | PEDTAVYYCQVMYYSG | | | | | | | | | | | |
| | | YDGYESTSWGQGTQVT | | | | | | | | | | | |
| | | VSSEPKTPKGGCGGGLE | | | | | | | | | | | |
| | | HHHHHH | | | | | | | | | | | |
| G45 | Chymo | MASMTGGQQMGRNSAE | SEQ ID | 1 | 1 | 2 | Yes | / | 3.171 | / | | | / |
| | | VQLVESGGGLVQPGGSL | NO: 45 | | | | | | | | | | |
| | | RLSCAASGSIFSINSMGW | | | | | | | | | | | |
| | | YRQAPGKQRELVAAITS | | | | | | | | | | | |
| | | GGSTNYANSVKGRFTIS | | | | | | | | | | | |
| | | RNNARNTVWLQMNSLK | | | | | | | | | | | |
| | | PEDTAVYYCNADLNVV | | | | | | | | | | | |
| | | RGYSGDYHGSSDYWGQ | | | | | | | | | | | |
| | | GTQVTVSSEPKTPKGGC | | | | | | | | | | | |
| | | GGGLEHHHHHH | | | | | | | | | | | |
| G46 | Chymo | MASMTGGQQMGRNSAD | SEQ ID | / | 2 | / | Yes | / | 0, No | / | | | / |
| | | VQLVESGGGLVQAGGSL | NO: 46 | | | | | | binding | | | | |
| | | RLSCAASGRTFSRYHMG | | | | | | | | | | | |
| | | WFRQAPGKERDVVAAIS | | | | | | | | | | | |
| | | WSGDSTYYADSVKGRFT | | | | | | | | | | | |
| | | ISKDNAKNTVYLQMDNL | | | | | | | | | | | |
| | | KPEDTAVYYCNVRGGV | | | | | | | | | | | |
| | | LRPYDYWGQGTQVTVS | | | | | | | | | | | |
| | | SEPKTPKGGCGGGLEHH | | | | | | | | | | | |
| | | HHHH | | | | | | | | | | | |
| G47 | Chymo | MASMTGGQQMGRNSAQ | SEQ ID | 1 | 0 | 1 | Yes | Yes | 3.86 | 3.91E+05 | 1.27E−02 | 3.24E−08 | DSS |
| | | VQLVESGGGLVQAGGSL | NO: 47 | | | | | | | | | | |
| | | RLSCAASERIFSNYAMG | | | | | | | | | | | |
| | | WFRQAPGKEREFVASIR | | | | | | | | | | | |
| | | GSGSQTSYADSVKGRFTI | | | | | | | | | | | |
| | | SRDGAKDTVDLQMNSL | | | | | | | | | | | |
| | | KPEDTAVYYCSAKKYC | | | | | | | | | | | |
| | | GSTYNRAEGYDYWGQG | | | | | | | | | | | |
| | | TQVTVSSEPKTPKGGCG | | | | | | | | | | | |
| | | GGLEHHHHHH | | | | | | | | | | | |
| | | | | | | | | | | | | | EDC |
| G48 | Chymo | MASMTGGQQMGRNSAQ | SEQ ID | / | 0 | 0 | Yes | Yes | 1.601 | 5.93E+03 | 7.53E−04 | 1.26E−07 | / |
| | | VQLVESGGGLVQAGGSL | NO: 48 | | | | | | | | | | |
| | | RLSCAASGRTFSTLSMG | | | | | | | | | | | |
| | | WFRQAPGQGREFVGGIN | | | | | | | | | | | |
| | | YDGSSVEYADSVKGRFT | | | | | | | | | | | |
| | | ISRDNAKNMMYLQMNS | | | | | | | | | | | |
| | | LKPEDTAAYYCASSRGY | | | | | | | | | | | |
| | | NTGTNPLGYDVWGQGT | | | | | | | | | | | |
| | | QVTVSSEPKTPKGGCGG | | | | | | | | | | | |
| | | GLEHHHHHH | | | | | | | | | | | |
| G49 | Chymo | MASMTGGQQMGRNSAE | SEQ ID | 2 | 0 | / | Yes | / | 5.545 | / | | | DSS |
| | | VQLVESGGGLVQAGGSL | NO: 49 | | | | | | | | | | |
| | | RLSCAASRSTFSINAAG | | | | | | | | | | | |
| | | WYRQAPGKQRELVAAIS | | | | | | | | | | | |
| | | SGGSANYADSVKGRFIIS | | | | | | | | | | | |
| | | RDNAKNTVYLQMNSLK | | | | | | | | | | | |
| | | PEDTAVYYCRVPYYRDD | | | | | | | | | | | |
| | | GYEYYSWGQGTQVTVS | | | | | | | | | | | EDC |
| | | SEPKTPKGGCGGGLEHH | | | | | | | | | | | |
| | | HHHH | | | | | | | | | | | |
| G50 | Chymo | MASMTGGQQMGRNSAE | SEQ ID | / | 1 | / | Yes | / | 1.091 | / | | | / |
| | | VQLVESGGGLVQAGGSL | NO: 50 | | | | | | | | | | |
| | | RLSCAASGRTFSRYHMG | | | | | | | | | | | |
| | | WFRQAPGKERDVVAAIS | | | | | | | | | | | |
| | | WSGDSTYYADSVKGRFT | | | | | | | | | | | |
| | | ISKDNAKNTVYLQMDSL | | | | | | | | | | | |
| | | KPEDTAVYYCATLSGW | | | | | | | | | | | |
| | | DGDTIFPAGSWGQGTQV | | | | | | | | | | | |
| | | TVSSEPKTPKGGCGGGL | | | | | | | | | | | |
| | | EHHHHHH | | | | | | | | | | | |
| G51 | Chymo | MASMTGGQQMGRNSAQ | SEQ ID | / | 0 | 2 | Yes | / | 4.449 | / | | | / |
| | | VQLVESGGGLVQAGGSL | NO: 51 | | | | | | | | | | |
| | | KLSCAASGITFSINTIGW | | | | | | | | | | | |
| | | YRQAPGKQREFVAHITS | | | | | | | | | | | |
| | | DSTTYYADSVKARFTISR | | | | | | | | | | | |
| | | DSAKNTVHLQMNNLKP | | | | | | | | | | | |
| | | EDTAVYYCNVNPTWPY | | | | | | | | | | | |
| | | GGEVDYWGQGTQVTVS | | | | | | | | | | | |
| | | SEPKTPKGGCGGGLEHH | | | | | | | | | | | |
| | | HHHH | | | | | | | | | | | |
| G52 | Chymo | MASMTGGQQMGRNSAE | SEQ ID | / | 0 | / | Yes | / | 1 | / | | | / |
| | | VQLVESGGGLVQAGGSL | NO: 52 | | | | | | | | | | |
| | | RLSCAASGSTFSSKPIGW | | | | | | | | | | | |
| | | YRQAPGKGRDLVAAIGG | | | | | | | | | | | |
| | | GSSTFYVDSVKGRFTMS | | | | | | | | | | | |
| | | RDNAKNTVALQMNSLK | | | | | | | | | | | |
| | | PEDTAVYYCNEYLGPKV | | | | | | | | | | | |
| | | LPIGSWGQGTQVTVSSEP | | | | | | | | | | | |
| | | KTPKGGCGGGLEHHHH | | | | | | | | | | | |
| | | HH | | | | | | | | | | | |
| G53 | Chymo | MASMTGGQQMGRNSAE | SEQ ID | 2 | 1 | / | Yes | / | 5.365 | / | | | DSS |
| | | VQLVESGGGLVQAGGSL | NO: [symbol] | | | | | | | | | | |
| | | RLSCVASGFTYSTYTMG | | | | | | | | | | | |
| | | WFRQAPGKEREIVAAKN | | | | | | | | | | | |
| | | WSGARIYYTESVKGRFTI | | | | | | | | | | | |
| | | SRDSGSNTMYLQMDSLK | | | | | | | | | | | |
| | | PEDTAVYYCAARLTWT | | | | | | | | | | | |
| | | DTTTPTTYPYWGQGTQV | | | | | | | | | | | |
| | | TVSSEPKTPKGGCGGGL | | | | | | | | | | | |
| | | EHHHHHH | | | | | | | | | | | |
| G54 | Chymo | MASMTGGQQMGRNSAQ | SEQ ID | 0 | 1 | 0 | Yes | / | 1.537 | / | | | / |
| | | VQLVESGGGLVKPGESL | NO: 54 | | | | | | | | | | |
| | | KLSCVASGETLSSYIMG | | | | | | | | | | | |
| | | WFRQAPGKEREFVAAVS | | | | | | | | | | | |
| | | WSGNQQDYADSVKGRF | | | | | | | | | | | |
| | | TISRDNAEKTVDLQMNS | | | | | | | | | | | |
| | | LNPEDTAVYYCAGDQIG | | | | | | | | | | | |
| | | FWSSRTQAHEYEYWGQ | | | | | | | | | | | |
| | | GTQVTVSSEPKTPKGGC | | | | | | | | | | | |
| | | GGGLEHHHHHH | | | | | | | | | | | |
| G55 | Chymo | MASMTGGQQMGRNSAH | SEQ ID | / | 0 | / | No | / | / | / | | | / |
| | | VQLVESGGGLVQAGGSL | NO: 55 | | | | | | | | | | |
| | | RLSCAASEDTFDNYAVA | | | | | | | | | | | |
| | | WFRQARGKEREFVAVIS | | | | | | | | | | | |
| | | WGGGRSTDYTDSVKGR | | | | | | | | | | | |
| | | FSISRDNAKNTVDLQMS | | | | | | | | | | | |
| | | SLKPDDTAVYYCHAQY | | | | | | | | | | | |
| | | YYEDGYEHESWGQGTQ | | | | | | | | | | | |
| | | VTVSSEPKTPKGGCGGG | | | | | | | | | | | |
| | | LEHHHHHH | | | | | | | | | | | |
| G56 | Trypsin/ | MASMTGGQQMGRNSAH | SEQ ID | 1 | / | 0 | No | / | / | / | | | / |
| | Chymo | VQLVESGFAFSSYAMSW | NO: 56 | | | | | | | | | | |
| | | VRQAPTYGREWVAGIYN | | | | | | | | | | | |
| | | DGSHIYYADSVKGRFSIS | | | | | | | | | | | |
| | | RDNVGNTLYLQLNSLQP | | | | | | | | | | | |
| | | NDTALYRCVQEHARGF | | | | | | | | | | | |
| | | GGWGNPNPTDLVYRAW | | | | | | | | | | | |
| | | GRGTQVTVSSEPKTPKG | | | | | | | | | | | |
| | | GCGGGLEHHHHHH | | | | | | | | | | | |
| G57 | Trypsin | MASMTGGQQMGRNSAE | SEQ ID | 0 | 1 | / | Yes | Yes | / | / | | | / |
| | | VQLVESGGGLVQPGGSL | NO: 57 | | | | | | | | | | |
| | | RLSCAASGFTLDYYAIG | | | | | | | | | | | |
| | | WFRQAPGKEREGVSCIS | | | | | | | | | | | |
| | | SSDGSTYYADSVKGRFTI | | | | | | | | | | | |
| | | SRDNAKNTVDLQMDRL | | | | | | | | | | | |
| | | KPEDTAVYYCAADRGSL | | | | | | | | | | | |
| | | YSSGRARAQDYTYWGR | | | | | | | | | | | |
| | | GTQVTVSSEPKTPKGGC | | | | | | | | | | | |
| | | GGGLEHHHHHH | | | | | | | | | | | |
| G58 | Chymo | MASMTGGQQMGRNSAE | SEQ ID | / | / | 0 | Yes | / | 1.537 | / | | | / |
| | | VQLVESGGGLVQAGGSL | NO: 58 | | | | | | | | | | |
| | | RLSCAGSGDTFSRYTLG | | | | | | | | | | | |
| | | WFRQAPGKEREFVAGIS | | | | | | | | | | | |
| | | WSGGSTSYANSVKGRFT | | | | | | | | | | | |
| | | ISRDNAKNTMYLQMNSL | | | | | | | | | | | |
| | | KPEDTAVYTCAAPGLPG | | | | | | | | | | | |
| | | TVVVGASDFYVYWGQG | | | | | | | | | | | |
| | | TQVTVSSEPKTPKGGCG | | | | | | | | | | | |
| | | GGLEHHHHHH | | | | | | | | | | | |
| G59 | Trypsin/ | MASMTGGQQMGRNSAD | SEQ ID | 1 | / | 0 | Yes | Yes | / | | | | / |
| | Chymo | VQLVESGGSLRLSCAAS | NO: 59 | | | | | | | | | | |
| | | GRTINTVGLAWFRQAPG | | | | | | | | | | | |
| | | QQRDFVAGIEIGGALRY | | | | | | | | | | | |
| | | ADSVQGRFTVSRDNAKN | | | | | | | | | | | |
| | | TMYLQMNSLKPEDTAV | | | | | | | | | | | |
| | | YYCGASRGFNIGINPLGY | | | | | | | | | | | |
| | | GGWGQGTQVTVSSEPKT | | | | | | | | | | | |
| | | PKGGCGGGLEHHHHHH | | | | | | | | | | | |
| G60 | Chymo | MASMTGGQQMGRNSAE | SEQ ID | 0 | / | 0 | Yes | Yes | 2.489 | 4.87E+03 | 5.86E−03 | 1.20E−06 | / |
| | | VQLVESGGSLRLSCAAS | NO: 60 | | | | | | | | | | |
| | | GSGFSSSIIAWYRQAPGK | | | | | | | | | | | |
| | | QRELVAAIGGPGSTNYA | | | | | | | | | | | |
| | | DFVEGRFTISRDNAKNT | | | | | | | | | | | |
| | | GYLQMNNLNPEDTAVY | | | | | | | | | | | |
| | | YCNEVTRSGREYWGQG | | | | | | | | | | | |
| | | TQVTVSSEPKTPKGGCG | | | | | | | | | | | |
| | | GGLEHHHHHH | | | | | | | | | | | |
| G61 | Chymo | MASMTGGQQMGRNSAQ | SEQ ID | / | 0 | 0 | No | / | / | / | | | / |
| | | VQLVESGGSLRLSCVAS | NO: 61 | | | | | | | | | | |
| | | GHTDCISGMGWYRQAP | | | | | | | | | | | |
| | | GKERELVAVLIGGGNTY | | | | | | | | | | | |
| | | YGDSVKGRFTISKDKAK | | | | | | | | | | | |
| | | NTLYLQMKTLKPEDTAV | | | | | | | | | | | |
| | | YYCTADDHGSECPNKE | | | | | | | | | | | |
| | | MSSTSTYWGQGTQVTVS | | | | | | | | | | | |
| | | SEPKTPKGGCGGGLEHH | | | | | | | | | | | |
| | | HHHH | | | | | | | | | | | |
| G62 | Trypsin | MASMTGGQQMGRNSAE | SEQ ID | / | / | 0 | No | / | / | / | | | / |
| | | VQLVESGGALVQAGGSL | NO: 62 | | | | | | | | | | |
| | | RLSCLVSGNIYNIKSVG | | | | | | | | | | | |
| | | WYRQAPGKEREDNVKN | | | | | | | | | | | |
| | | TVDLQMNSLKPEDAAV | | | | | | | | | | | |
| | | YYCNARDSSRPRSLPASP | | | | | | | | | | | |
| | | ESLDGRMDVWGKGTQV | | | | | | | | | | | |
| | | TVSSEPKTPKGGCGGGL | | | | | | | | | | | |
| | | EHHHHHH | | | | | | | | | | | |
| G63 | Trypsin | MASMTGGQQMGRNSAQ | SEQ ID | / | 0 | 0 | No | / | / | / | | | / |
| | | VQLVESGGGLVQPGGSL | NO: 63 | | | | | | | | | | |
| | | RLSCKASGFAFSSYAMS | | | | | | | | | | | |
| | | WVRQAPRYGREWVAGI | | | | | | | | | | | |
| | | YNDGSHIYYADSVKGRF | | | | | | | | | | | |
| | | SISRDNVGNTLYLQLNSL | | | | | | | | | | | |
| | | QPNDTALYRCVQEHERG | | | | | | | | | | | |
| | | FGGWGNPNPTDLVYRA | | | | | | | | | | | |
| | | WGRGTQVTVSSEPKTPK | | | | | | | | | | | |
| | | GGCGGGLEHHHHHH | | | | | | | | | | | |
| G64 | Chymo | MASMTGGQQMGRNSAH | SEQ ID | 2 | 0 | 2 | Yes | / | 5.676 | / | | | / |
| | | VQLVESGGGLVQAGGSL | NO: 64 | | | | | | | | | | |
| | | RLSCKVSGTTFSNSAIGW | | | | | | | | | | | |
| | | YRQAPGNRRELVATINY | | | | | | | | | | | |
| | | GGSTNYADSGKGRFTIS | | | | | | | | | | | |
| | | KDNAKNTVYLQMNSLK | | | | | | | | | | | |
| | | PEDTAVYYCKTTEWRED | | | | | | | | | | | |
| | | GYEYDVWGQGTQVTVS | | | | | | | | | | | |
| | | SEPKTPKGGCGGGLEHH | | | | | | | | | | | |
| | | HHHH | | | | | | | | | | | |
| G65 | Chymo | MASMTGGQQMGRNSAQ | SEQ ID | / | / | 2 | Yes | / | 3.971 | / | | | / |
| | | VQLVESGGGLVQAGGSL | NO: 65 | | | | | | | | | | |
| | | RLSCATSGRTFSTYALG | | | | | | | | | | | |
| | | WFRQRPGKEREFVATIH | | | | | | | | | | | |
| | | WSDGRTLYADSVKGRFT | | | | | | | | | | | |
| | | LSRDNAQNTVYLQMNS | | | | | | | | | | | |
| | | LKPEDTAIYYCAASIYRI | | | | | | | | | | | |
| | | GSYDVSTSQGYDYWGQ | | | | | | | | | | | |
| | | GTQVTVSSEPKTPKGGC | | | | | | | | | | | |
| | | GGGLEHHHHHH | | | | | | | | | | | |
| G66 | Chymo | MASMTGGQQMGRNSAQ | SEQ ID | / | 2 | 2 | Yes | / | 4.291 | / | | | DSS |
| | | VQLVESGGGLVQAGGSL | NO: 66 | | | | | | | | | | |
| | | RLSCATSGRTFSTYAMG | | | | | | | | | | | |
| | | WFRQRPGKEREFVATIH | | | | | | | | | | | |
| | | WSDGRTLYTDSVKGRFT | | | | | | | | | | | |
| | | LSRDNAQNTVYLQMNS | | | | | | | | | | | |
| | | LKPEDTAVYYCAAATYR | | | | | | | | | | | |
| | | IGSYDVSTSQGYNYWGQ | | | | | | | | | | | |
| | | GTQVTVSSEPKTPKGGC | | | | | | | | | | | |
| | | GGGLEHHHHHH | | | | | | | | | | | |
| G67 | Trypsin/ | MASMTGGQQMGRNSAH | SEQ ID | 1 | 0 | / | Yes | / | 3.604 | / | | | / |
| | Chymo | VQLVESGGGLVQAGGSL | NO: 67 | | | | | | | | | | |
| | | RLSCVASGHTVSNYAM | | | | | | | | | | | |
| | | AWFRQAPGKEREFVAGI | | | | | | | | | | | |
| | | SWRATLTYYRDSVKGRF | | | | | | | | | | | |
| | | TISRDNAKNTVYLQMSS | | | | | | | | | | | |
| | | LKPEDTAVYFCASDRTP | | | | | | | | | | | |
| | | YVSRGTSLVEYDYWGQ | | | | | | | | | | | |
| | | GTQVTVSSEPKTPKGGC | | | | | | | | | | | |
| | | GGGLEHHHHHH | | | | | | | | | | | |
| G68 | Chymo | MASMTGGQQMGRNSAE | SEQ ID | 2 | / | 1 | Yes | / | 1.075 | / | | | / |
| | | VQLVESGGGLVQAGGSL | NO: 68 | | | | | | | | | | |
| | | RLSCTASGSIFSVNVMD | | | | | | | | | | | |
| | | WYRQAPGKQREFVATIT | | | | | | | | | | | |
| | | GSGATNYADSVKGRFTI | | | | | | | | | | | |
| | | SRGSAKNTVYLQMNSLK | | | | | | | | | | | |
| | | PDDTAVYYCHNADYRE | | | | | | | | | | | |
| | | DGYEYDNWGQGTQVTV | | | | | | | | | | | |
| | | SSEPKTPKGGCGGGLEH | | | | | | | | | | | |
| | | HHHHH | | | | | | | | | | | |
| G69 | | MASMTGGQQMGRNSAQ | SEQ ID | / | / | 2 | Yes | / | 3.687 | / | | | DSS |
| | | VQLVESGGGLVQAGGSL | NO: 69 | | | | | | | | | | |
| | | RLSCVDSGRTFSSNTMG | | | | | | | | | | | |
| | | WFRQAPGKDRDFVAAIN | | | | | | | | | | | |
| | | RSGVITNYADSVKGRFTI | | | | | | | | | | | |
| | | SRDNAKNTVYLQLNSLK | | | | | | | | | | | |
| | | PEDTAVYYCAARAGGW | | | | | | | | | | | |
| | | PSQIPVEYDRWGQGTQV | | | | | | | | | | | |
| | | TVSSEPKTPKGGCGGGL | | | | | | | | | | | |
| | | EHHHHHH | | | | | | | | | | | |
| G70 | Chymo | MASMTGGQQMGRNSAQ | SEQ ID | 1 | 1 | 2 | Yes | / | 1.755 | / | | | / |
| | | VQLVESGGGLVQAGGSL | NO: 70 | | | | | | | | | | |
| | | RLSCAASGATFSINAIGW | | | | | | | | | | | |
| | | YRQAPGKQRELVAVIKS | | | | | | | | | | | |
| | | GNSINYADSVKGRFTISR | | | | | | | | | | | |
| | | DHAKNTVYLQMNNLKP | | | | | | | | | | | |
| | | EDTAVYYCHADQPPETG | | | | | | | | | | | |
| | | WGTWNDLWGQGTQVT | | | | | | | | | | | |
| | | VSSEPKTPKGGCGGGLE | | | | | | | | | | | |
| | | HHHHHH | | | | | | | | | | | |
| G71 | Trypsin/ | MASMTGGQQMGRNSAQ | SEQ ID | 1 | 2 | / | No | / | / | / | | | / |
| | Chymo | VQLVESGGGSVQAGGSL | NO: 71 | | | | | | | | | | |
| | | RLSCAASGRTSVSYAMG | | | | | | | | | | | |
| | | WFRQAPGKEREFVAAVS | | | | | | | | | | | |
| | | RSGTNLYYADSVKGRFT | | | | | | | | | | | |
| | | ISRHTAENTMYLQMNSL | | | | | | | | | | | |
| | | LPEDTALYYCAADEALR | | | | | | | | | | | |
| | | WGIGTQPRSEFFDYWGQ | | | | | | | | | | | |
| | | GTQVTVSSEPKTPKGGC | | | | | | | | | | | |
| | | GGGLEHHHHHH | | | | | | | | | | | |
| G72 | Chymo | MASMTGGQQMGRNSAQ | SEQ ID | / | / | 1 | Yes | / | 0, No | / | | | / |
| | | VQLVESGGGLVQPGGSL | NO: 72 | | | | | | binding | | | | |
| | | RLSCATSGSTFSINGIGW | | | | | | | | | | | |
| | | YRQVPGIEREFVAGVST | | | | | | | | | | | |
| | | DGKANYADSVAGRFTISI | | | | | | | | | | | |
| | | NDGKNTAYLQMNSLKP | | | | | | | | | | | |
| | | EDTAVYYCNVDSTKGY | | | | | | | | | | | |
| | | YWGQGTQVTVSSEPKTP | | | | | | | | | | | |
| | | KGGCGGGLEHHHHHH | | | | | | | | | | | |
| G73 | Chymo | MASMTGGQQMGRNSAE | SEQ ID | / | / | 1 | Yes | / | 0.9549 | / | | | / |
| | | VQLVESGGGLVQAGGSL | NO: 73 | | | | | | | | | | |
| | | RLSCAASGRTFSDDAMA | | | | | | | | | | | |
| | | WFRQAPGKEREFVAAIS | | | | | | | | | | | |
| | | WHPENTFYADSVKGRFT | | | | | | | | | | | |
| | | ISRDKTKNTEYLQMNSL | | | | | | | | | | | |
| | | KPEDTAVYYCAAGPRLE | | | | | | | | | | | |
| | | IGDYAQYKYWGQGTQV | | | | | | | | | | | |
| | | TVSSEPKTPKGGCGGGL | | | | | | | | | | | |
| | | EHHHHHH | | | | | | | | | | | |
| G74 | Chymo | MASMTGGQQMGRNSAQ | SEQ ID | / | / | 1 | Yes | Yes | / | / | | | / |
| | | VQLVESGGGLVQPGGSL | NO: 74 | | | | | | | | | | |
| | | TLSCAASGSTIDDGIGWF | | | | | | | | | | | |
| | | RQASGKEREGVSCIRLSD | | | | | | | | | | | |
| | | GSKYYRDIVKGRFTISRD | | | | | | | | | | | |
| | | NAKNTVYLQMNSLKPE | | | | | | | | | | | |
| | | DTAVYYCANGPCTGPRA | | | | | | | | | | | |
| | | IAEILYGAWGQGTQVTV | | | | | | | | | | | |
| | | SSEPKTPKGGCGGGLEH | | | | | | | | | | | |
| | | HHHHH | | | | | | | | | | | |
| G75 | Chymo | MASMTGGQQMGRNSAH | SEQ ID | / | / | 0 | Yes | Yes | / | / | | | / |
| | | VQLVESGGGLVQAGASL | NO: 75 | | | | | | | | | | |
| | | RLTCGPSGRSVGLYTMG | | | | | | | | | | | |
| | | WFRQAPGKEREFVAGVT | | | | | | | | | | | |
| | | YLGDTTTYSDAVKGRFT | | | | | | | | | | | |
| | | ISRENNKNTVYLRMNSL | | | | | | | | | | | |
| | | KPEDTAVYYCTATATG | | | | | | | | | | | |
| | | WGSPIPSAPGRWGYWG | | | | | | | | | | | |
| | | QGTQVTVSSEPKTPKGG | | | | | | | | | | | |
| | | CGGGLEHHHHHH | | | | | | | | | | | |
| G76 | Trypsin | MASMTGGQQMGRNSAQ | SEQ ID | / | / | 0 | Yes | / | 0, No | / | | | / |
| | | VQLVESGGGLVQPGGSL | NO: 76 | | | | | | binding | | | | |
| | | RLSCVVSGFPFSEYAMS | | | | | | | | | | | |
| | | WVRQTPEKGREWVSGIY | | | | | | | | | | | |
| | | TDGSETLYENSVKGRFTI | | | | | | | | | | | |
| | | SRDNTKNTLYLQMNNL | | | | | | | | | | | |
| | | KPEDTARYYCKLGDPYG | | | | | | | | | | | |
| | | VGLRDYEYLGHGTQVT | | | | | | | | | | | |
| | | VSSEPKTPKGGCGGGLE | | | | | | | | | | | |
| | | HHHHHH | | | | | | | | | | | |
| G77 | Chymo | MASMTGGQQMGRDPAQ | SEQ ID | 2 | 1 | 2 | Yes | / | 6.012 | / | | | / |
| | | VQLVESGGGLVQAGGSL | NO: 77 | | | | | | | | | | |
| | | RLSCTASRSTFRVNPAG | | | | | | | | | | | |
| | | WYRQAPGKERELVARIT | | | | | | | | | | | |
| | | SGGSTNYADSVKGRFTIS | | | | | | | | | | | |
| | | RDNAKNTVYLQMNSLK | | | | | | | | | | | |
| | | PEDTAVYYCNVPYYME | | | | | | | | | | | |
| | | DGYEHDAWGQGTQVTV | | | | | | | | | | | |
| | | SSEPKTPKGGCGGGLEH | | | | | | | | | | | |
| | | HHHHH | | | | | | | | | | | |
| G78 | Chymo | MASMTGGQQMGRDPAD | SEQ ID | 2 | 0 | 2 | Yes | / | 2.082 | / | | | DSS |
| | | VQLVESGGGLVQAGGSL | NO: 78 | | | | | | | | | | |
| | | RLSCTASQSILYINVMG | | | | | | | | | | | |
| | | WYRQAPGKQRELVAEIP | | | | | | | | | | | |
| | | TGGNTDYADSVKGRFTI | | | | | | | | | | | |
| | | SRDNVKNTVSLQMNSLK | | | | | | | | | | | |
| | | PEDTAVYYCNVRGGVLS | | | | | | | | | | | |
| | | PYDYWGQGTQVTVSSEP | | | | | | | | | | | |
| | | KTPKGGCGGGLEHHHH | | | | | | | | | | | |
| | | HH | | | | | | | | | | | |
| G79 | Chymo | MASMTGGQQMGRDPAD | SEQ ID | 2 | 2 | 2 | Yes | / | 2.07 | / | | | / |
| | | VQLVESGGGLVQAGGSL | NO: 79 | | | | | | | | | | |
| | | RLSCATSGRTFSTYAAG | | | | | | | | | | | |
| | | WFRQRPGKEREFVATIH | | | | | | | | | | | |
| | | WNDGRTLYADSVKGRF | | | | | | | | | | | |
| | | TLSRDNAQNTVYLQMN | | | | | | | | | | | |
| | | SLKPEDTAVYYCAAYTY | | | | | | | | | | | |
| | | RIGSYDVSTSQGYDYWG | | | | | | | | | | | |
| | | QGTQVTVSSEPKTPKGG | | | | | | | | | | | |
| | | CGGGLEHHHHHH | | | | | | | | | | | |
| G80 | chymo | MASMTGGQQMGRDPAQ | SEQ ID | 2 | 1 | 2 | Yes | / | 4.428 | / | | | EDC |
| | | VQLVESGGGLVQAGASL | NO: 80 | | | | | | | | | | |
| | | RLSCAASRGTFSSYTMG | | | | | | | | | | | |
| | | WFRQAPGKERLFVASIS | | | | | | | | | | | |
| | | RDGGTTYYADSVKGRFT | | | | | | | | | | | |
| | | ISRDNAENILYLQMNSLK | | | | | | | | | | | |
| | | PEDTAVYYCAAASRHPS | | | | | | | | | | | |
| | | TWEVWGLEYYYWGQG | | | | | | | | | | | |
| | | TQVTVSSEPKTPKGGCG | | | | | | | | | | | |
| | | GGLEHHHHHH | | | | | | | | | | | |
| G81 | chymo | MASMTGGQQMGRDPAE | SEQ ID | 2 | 1 | 2 | Yes | / | 0, No | / | | | / |
| | | VQLVESGGELVQAGGSL | NO: 81 | | | | | | binding | | | | |
| | | RLSCAASGRTDSVTRMA | | | | | | | | | | | |
| | | WFRQAPGKEREFVAAIT | | | | | | | | | | | |
| | | WSSGYTYYPDSVKGRFT | | | | | | | | | | | |
| | | ISRDNAKNTMYLQMNSL | | | | | | | | | | | |
| | | KAEDTAVYICAAAVGVI | | | | | | | | | | | |
| | | SEYNSWGQGTQVTVSSE | | | | | | | | | | | |
| | | PKTPKGGCGGGLEHHHH | | | | | | | | | | | |
| | | HH | | | | | | | | | | | |
| G82 | Chymo | MASMTGGQQMGRDPAH | SEQ ID | 2 | 1 | 2 | Yes | / | 7.218 | 1.11E+06 | 5.61E−04 | 5.04E−10 | EDC |
| | | VQLVESGGGLVQAGGSL | NO: 82 | | | | | | | | | | |
| | | RLSCAASGKIFSLSTMG | | | | | | | | | | | |
| | | WYRQAPGKQRELVAAL | | | | | | | | | | | |
| | | TSGGSTNYADSVKGRFTI | | | | | | | | | | | |
| | | SRDNAKYTTYLQMNSL | | | | | | | | | | | |
| | | KPEDTAVYYCNVRYYS | | | | | | | | | | | |
| | | GYDGYESNSWGQGTQV | | | | | | | | | | | |
| | | TVSSEPKTPKGGCGGGL | | | | | | | | | | | |
| | | EHHHHHH | | | | | | | | | | | |
| G83 | Trypsin | MASMTGGQQMGRDPAQ | SEQ ID | 2 | 1 | 2 | Yes | / | 8.716 | 9.87E+05 | 7.51E−04 | 7.61E−10 | EDC |
| | | VQLVESGGGLVQAGGSL | NO: 83 | | | | | | | | | | |
| | | RLSCAASRRTFSIYNMG | | | | | | | | | | | |
| | | WFRQAPGKEREFVATIT | | | | | | | | | | | |
| | | RYGDRTYTADSVKGRFT | | | | | | | | | | | |
| | | ISSDQAKNTVYLQMNSL | | | | | | | | | | | |
| | | NPHDTAVYYCAADSAY | | | | | | | | | | | |
| | | SGPDFKHYDYWGQGTQ | | | | | | | | | | | |
| | | VTVSSEPKTPKGGCGGG | | | | | | | | | | | |
| | | LEHHHHHH | | | | | | | | | | | |
| G84 | Chymo | MASMTGGQQMGRDPAD | SEQ ID | 2 | / | 2 | No | / | / | / | | | / |
| | | VQLVESGGGLVQPGGSL | NO: 84 | | | | | | | | | | |
| | | RLSCAASGSTFSINAIGW | | | | | | | | | | | |
| | | YRQAPGKEREFVAALR | | | | | | | | | | | |
| | | WPGNIWYYADFVEGRIT | | | | | | | | | | | |
| | | ISRDNAKNTVYLQMNSL | | | | | | | | | | | |
| | | KPEDTAVYYCAATVGLD | | | | | | | | | | | |
| | | SPPRNEYDYWGQGTQV | | | | | | | | | | | |
| | | TVSSEPKTPKGGCGGGL | | | | | | | | | | | |
| | | EHHHHHH | | | | | | | | | | | |
| G85 | Trypsin | MASMTGGQQMGRDPAH | SEQ ID | 2 | 0 | / | Yes | / | 0, No | / | | | / |
| | | VQLVESGGGLVQPGGSL | NO: 85 | | | | | | binding | | | | |
| | | RLSCAASGFTFSTYAMG | | | | | | | | | | | |
| | | WVRQAPGKGPEWVATI | | | | | | | | | | | |
| | | YSKGDTTHYANSAKGRF | | | | | | | | | | | |
| | | TISRDNARNTLYLQMNS | | | | | | | | | | | |
| | | LKPEDTAVYYCAKGISD | | | | | | | | | | | |
| | | SYLRVESNYRGQGTQVT | | | | | | | | | | | |
| | | VSSEPKTPKGGCGGGLE | | | | | | | | | | | |
| | | HHHHHH | | | | | | | | | | | |
| G86 | Trypsin | MASMTGGQQMGRDPAE | SEQ ID | 2 | / | / | Yes | / | 5.542 | / | | | / |
| | | VQLVESGGGLVQAGDSL | NO: 86 | | | | | | | | | | |
| | | RLSCAASGRTFSSYTMG | | | | | | | | | | | |
| | | WFRQAPGKEREFVAGIR | | | | | | | | | | | |
| | | WSGGSTYFTNYEDSVKG | | | | | | | | | | | |
| | | RFTISKDNAKNTVFLQM | | | | | | | | | | | |
| | | NSLRPEDTAVYYCAFTG | | | | | | | | | | | |
| | | HYSTYDSPQRYDYWGQ | | | | | | | | | | | |
| | | GTQVTVSSEPKTPKGGC | | | | | | | | | | | |
| | | GGGLEHHHHHH | | | | | | | | | | | |
| G87 | Trypsin | MASMTGGQQMGRDPAE | SEQ ID | 0 | 1 | 1 | Yes | / | 0, No | / | | | / |
| | | VQLVESGGGLVQAGDSL | NO: 87 | | | | | | binding | | | | |
| | | RLSCAASGRTFSSYNLG | | | | | | | | | | | |
| | | WFRQAPGKEREFVAVM | | | | | | | | | | | |
| | | NCRYGDTDYPDSVKGRF | | | | | | | | | | | |
| | | TMSRDNAKNTLYLEMN | | | | | | | | | | | |
| | | NLKPEDTAVYYCAAKVL | | | | | | | | | | | |
| | | AYCGSGYYYRRNDYGY | | | | | | | | | | | |
| | | WGQGTQVTVSSEPKTPK | | | | | | | | | | | |
| | | GGCGGGLEHHHHHH | | | | | | | | | | | |
| G88 | Chymo | MASMTGGQQMGRDPAE | SEQ ID | 0 | 1 | 0 | No | / | / | / | | | / |
| | | VQLVESGGGLVKPGESL | NO: 88 | | | | | | | | | | |
| | | KLSCVASGETLSSYIMG | | | | | | | | | | | |
| | | WFRQAPGKEREFVAAVS | | | | | | | | | | | |
| | | WSGNQQDYADSVKGQF | | | | | | | | | | | |
| | | TISRDNAEKTVDLQMNS | | | | | | | | | | | |
| | | LNPEDTAVYYCAGDQM | | | | | | | | | | | |
| | | GFWSSRTQAHEYEYWG | | | | | | | | | | | |
| | | QGTQVTVSSEPKTPKGG | | | | | | | | | | | |
| | | CGGGLEHHHHHH | | | | | | | | | | | |
| G89 | Chymo | MASMTGGQQMGRDPAE | SEQ ID | 0 | / | 2 | Yes | / | 5.736 | / | | | / |
| | | VQLVESGGGLVQAGGSL | NO: 89 | | | | | | | | | | |
| | | SLSCAASGSINSINAMG | | | | | | | | | | | |
| | | WFRQAPGKQRELVATIT | | | | | | | | | | | |
| | | RGGSTNYADSVKGRFTI | | | | | | | | | | | |
| | | SIDNAKNTVYLQMNSLK | | | | | | | | | | | |
| | | PEDTAVYYCNADRGTD | | | | | | | | | | | |
| | | DGWLYDYWGQGTQVT | | | | | | | | | | | |
| | | VSSEPKTPKGGCGGGLE | | | | | | | | | | | |
| | | HHHHHH | | | | | | | | | | | |
| G90 | Trypsin | MASMTGGQQMGRDPAD | SEQ ID | 1 | 0 | 2 | Yes | / | 5.832 | / | | | EDC |
| | | VQLVESGGGLVQAGGSL | NO: 90 | | | | | | | | | | |
| | | RLSCAASGLTFSNYAMG | | | | | | | | | | | |
| | | WFRQAPGKEREFAAGIT | | | | | | | | | | | |
| | | WNGGASHYADSVKGRF | | | | | | | | | | | |
| | | TISRDNAQNTVYLQMNS | | | | | | | | | | | |
| | | LKPEDTAVYYCAARLGS | | | | | | | | | | | |
| | | VAYPGLRYDYWGQGTQ | | | | | | | | | | | |
| | | VTVSSEPKTPKGGCGGG | | | | | | | | | | | |
| | | LEHHHHHH | | | | | | | | | | | |
| G91 | Trypsin/ | MASMTGGQQMGRDPAE | SEQ ID | 0 | / | / | Yes | / | 1.145 | / | | | / |
| | Chymo | VQLVESGGGLVQAGGSL | NO: 91 | | | | | | | | | | |
| | | RLSCAASGRTFSDYPMA | | | | | | | | | | | |
| | | WFRQALGKEREFLATIST | | | | | | | | | | | |
| | | SGSRTMYADSVKGRFTI | | | | | | | | | | | |
| | | SRDNAKNMMYLQMNSL | | | | | | | | | | | |
| | | KPEDAAVYYCAARQGS | | | | | | | | | | | |
| | | YYSDYNRALPGEYHYW | | | | | | | | | | | |
| | | GQGTQVTVSSEPKTPKG | | | | | | | | | | | |
| | | GCGGGLEHHHHHH | | | | | | | | | | | |
| G92 | Chymo | MASMTGGQQMGRDPAD | SEQ ID | 0 | / | 0 | No | / | / | / | | | / |
| | | VQLVESGGGLVKPGESL | NO: 92 | | | | | | | | | | |
| | | KLSCVASGETLSSYIMG | | | | | | | | | | | |
| | | WFRQAPGQGRKFVGGIN | | | | | | | | | | | |
| | | YSGSSVEYADSVKGRFTI | | | | | | | | | | | |
| | | SRDNAKNTMYLQMNSL | | | | | | | | | | | |
| | | KPEDTAAYYCASSRGYN | | | | | | | | | | | |
| | | TGTNPLGYNYWGQGTQ | | | | | | | | | | | |
| | | VTVSSEPKTPKGGCGGG | | | | | | | | | | | |
| | | LEHHHHHH | | | | | | | | | | | |
| G93 | Chymo | MASMTGGQQMGRDPAQ | SEQ ID | 0 | / | / | Yes | / | 2.16 | / | | | / |
| | | VQLVESGGGLVQPGGSL | NO: 93 | | | | | | | | | | |
| | | RLSCAASGSGFSSSIIGW | | | | | | | | | | | |
| | | HRQAPGKQRELVAAIGG | | | | | | | | | | | |
| | | PGSTNYADSVKGRFTISR | | | | | | | | | | | |
| | | DNAKNTAYLQMNNLKP | | | | | | | | | | | |
| | | EDSAVYYCEATTRSGRE | | | | | | | | | | | |
| | | YWGQGTQVTVSSEPKTP | | | | | | | | | | | |
| | | KGGCGGGLEHHHHHH | | | | | | | | | | | |
| G94 | Chymo | MASMTGGQQMGRDPAH | SEQ ID | 0 | 0 | 0 | No | / | / | / | | | / |
| | | VQLVESGGGLVQPGGSL | NO: 94 | | | | | | | | | | |
| | | RLSCVASGFTFSAYAMS | | | | | | | | | | | |
| | | WVRQVPGKGREWISGIY | | | | | | | | | | | |
| | | NDGSNIYYTDSVKGRFSI | | | | | | | | | | | |
| | | SRDNAKNTLYLQMNNL | | | | | | | | | | | |
| | | KPDDTAVYYCTKEHAR | | | | | | | | | | | |
| | | GFGGRGNPNPSDLVYDA | | | | | | | | | | | |
| | | WGQGTQVTVSSEPKTPK | | | | | | | | | | | |
| | | GGCGGGLEHHHHHH | | | | | | | | | | | |
| G95 | Trypsin/ | MASMTGGQQMGRDPAH | SEQ ID | / | 2 | 1 | Yes | / | 3.76 | 1.39E+04 | 1.07E−03 | 7.70E−08 | / |
| | Chymo | VQLVESGGGLVQAGGSL | NO: 95 | | | | | | | | | | |
| | | RLSCAASGRTFSSYAMA | | | | | | | | | | | |
| | | WFRQAVGKEREFVAAV | | | | | | | | | | | |
| | | SRSGTNLYYADSVKGRF | | | | | | | | | | | |
| | | TISRDTAKNTMYLQMNS | | | | | | | | | | | |
| | | LKPEDTALYYCAAGEAL | | | | | | | | | | | |
| | | RWGIGQQPRSEFFDYWG | | | | | | | | | | | |
| | | QGTQVTVSSEPKTPKGG | | | | | | | | | | | |
| | | CGGGLEHHHHHH | | | | | | | | | | | |
| G96 | Chymo | MASMTGGQQMGRDPAD | SEQ ID | / | 0 | / | Yes | / | 6.769 | / | | | EDC |
| | | VQLVESGGGLVQAGGSL | NO: 96 | | | | | | | | | | |
| | | KLSCAAFGVTFDINTIAW | | | | | | | | | | | |
| | | YRQAPGKQREFVAHITS | | | | | | | | | | | |
| | | GGTTYYADSVKARFTMS | | | | | | | | | | | |
| | | RDSAKNTVYLQMNNLK | | | | | | | | | | | |
| | | PEDTAVYYCNVNPTWP | | | | | | | | | | | |
| | | YSGEVDYWGQGTQVTV | | | | | | | | | | | |
| | | SSEPKTPKGGCGGGLEH | | | | | | | | | | | |
| | | HHHHH | | | | | | | | | | | |
| G97 | Chymo | MASMTGGQQMGRDPAE | SEQ ID | / | 2 | / | Yes | / | 3.298 | / | | | / |
| | | VQLVESGGGLVQAGGSL | NO: 97 | | | | | | | | | | |
| | | RLSCTASRSTFRVNPAG | | | | | | | | | | | |
| | | WYRQAPGKERELVARIT | | | | | | | | | | | |
| | | SGGSTNYADSVKGRFTIS | | | | | | | | | | | |
| | | RDNAKNTVYLQMNSLK | | | | | | | | | | | |
| | | PEDTAVYYCNVPCYME | | | | | | | | | | | |
| | | DGYEHDAWGQGTQVTV | | | | | | | | | | | |
| | | SSEPKTPKGGCGGGLEH | | | | | | | | | | | |
| | | HHHHH | | | | | | | | | | | |
| G98 | Chymo | MASMTGGQQMGRDPAQ | SEQ ID | 2 | 2 | 2 | Yes | / | 4.669 | / | | | / |
| | | VQLVESGGGLVQAGDSL | NO: 98 | | | | | | | | | | |
| | | RLSCATSGRTFSTYAAG | | | | | | | | | | | |
| | | WFRQRPGKEREFVATIH | | | | | | | | | | | |
| | | WNDGRTLYADSVKGRF | | | | | | | | | | | |
| | | TLSRDNAQNTVYLQMN | | | | | | | | | | | |
| | | SLKPEDTAVYYCAASTY | | | | | | | | | | | |
| | | RIGSYDVSTSQGYDYWG | | | | | | | | | | | |
| | | QGTQVTVSSEPKTPKGG | | | | | | | | | | | |
| | | CGGGLEHHHHHH | | | | | | | | | | | |
| | | | | | | | | | | | | | CX |
| | | | | | | | | | Cross- | CX | CX | CX | Model |
| | | | | | | | | | linked | residue | residue | Model | Epi- |
| | | | | | | | | ID | Peptides | on GST | on Nbs | Folder | tope |
| | | | | | | | | G1 | / | / | / | / | / |
| | | | | | | | | G2 | / | / | / | / | / |
| | | | | | | | | G3 | / | / | / | / | / |
| | | | | | | | | G4 | / | / | / | / | / |
| | | | | | | | | G5 | / | / | / | / | / |
| | | | | | | | | G6 | / | / | / | / | / |
| | | | | | | | | G7 | / | / | / | / | / |
| | | | | | | | | G8 | / | / | / | / | / |
| | | | | | | | | G9 | RIEAIPQIDK | GST(191) | G9(101) | Seq_ | E1 |
| | | | | | | | | | YLK (SEQ ID | | | 17023 | |
| | | | | | | | | | NO: 2537)(10)- | | | | |
| | | | | | | | | | NTVYLQMNS | | | | |
| | | | | | | | | | LKPEDTAVY | | | | |
| | | | | | | | | | YCAAGLQYG | | | | |
| | | | | | | | | | ITSLR (SEQ | | | | |
| | | | | | | | | | ID NO: | | | | |
| | | | | | | | | | 2538)(11) | | | | |
| | | | | | | | | G10 | / | / | / | / | / |
| | | | | | | | | G11 | / | / | / | / | / |
| | | | | | | | | G12 | YEEHLYERD | GST(40) | G12(90) | Seq_ | E2 |
| | | | | | | | | | EGDKWR | | | 20204 | |
| | | | | | | | | | (SEQ ID NO: | | | | |
| | | | | | | | | | 2539)(13)- | | | | |
| | | | | | | | | | DNAKNTVYL | | | | |
| | | | | | | | | | QMNSLKPED | | | | |
| | | | | | | | | | TAVYYCNVP | | | | |
| | | | | | | | | | YYR (SEQ ID | | | | |
| | | | | | | | | | NO: 2540)(4) | | | | |
| | | | | | | | | | VDFLSKLPE | GST(125) | G12(123) | | |
| | | | | | | | | | MLK (SEQ ID | | | | |
| | | | | | | | | | NO: 2541)(6)- | | | | |
| | | | | | | | | | EDGYEYDA | | | | |
| | | | | | | | | | WGQGTQVT | | | | |
| | | | | | | | | | VSSEPK (SEQ | | | | |
| | | | | | | | | | ID NO: 2542) | | | | |
| | | | | | | | | | (7) | | | | |
| | | | | | | | | | VDFLSKLPE | GST(125) | G12(121) | | |
| | | | | | | | | | MLK (SEQ ID | | | | |
| | | | | | | | | | NO: 2541)(6)- | | | | |
| | | | | | | | | | NTVYLQMNS | | | | |
| | | | | | | | | | LKPEDTAVY | | | | |
| | | | | | | | | | YCNVPYYRE | | | | |
| | | | | | | | | | DGYEYDAW | | | | |
| | | | | | | | | | GQGTQVTVS | | | | |
| | | | | | | | | | SEPK (SEQ ID | | | | |
| | | | | | | | | | NO: 2543)(31) | | | | |
| | | | | | | | | | SDLEVLFQGP | GST(233) | G12(79) | | |
| | | | | | | | | | LGSPEFPGR | | | | |
| | | | | | | | | | (SEQ ID NO: | | | | |
| | | | | | | | | | 2544)(15)- | | | | |
| | | | | | | | | | ISSGGSTNYA | | | | |
| | | | | | | | | | DSVKGR | | | | |
| | | | | | | | | | (SEQ ID NO: | | | | |
| | | | | | | | | | 2545)(14) | | | | |
| | | | | | | | | G13 | RIEAIPQIDK | GST(191) | G13(20) | Seq_ | E3 |
| | | | | | | | | | YLK (SEQ ID | | | 73309 | |
| | | | | | | | | | NO: 2537) | | | | |
| | | | | | | | | | (10)- | | | | |
| | | | | | | | | | ASMTGGQQ | | | | |
| | | | | | | | | | MGR (SEQ ID | | | | |
| | | | | | | | | | NO: 2546)(1) | | | | |
| | | | | | | | | | KRIEAIPQID | GST(181) | G13(2) | | |
| | | | | | | | | | K (SEQ ID | | | | |
| | | | | | | | | | NO: 2547)(1)- | | | | |
| | | | | | | | | | ASMTGGQQ | | | | |
| | | | | | | | | | MGR (SEQ ID | | | | |
| | | | | | | | | | NO: 2546)(1) | | | | |
| | | | | | | | | | LLLEYLEEK | GST(27) | G13(2) | | |
| | | | | | | | | | YEEHLYER | | | | |
| | | | | | | | | | (SEQ ID NO: | | | | |
| | | | | | | | | | 2548)(9)- | | | | |
| | | | | | | | | | ASMTGGQQ | | | | |
| | | | | | | | | | MGR (SEQ ID | | | | |
| | | | | | | | | | NO: 2546)(1) | | | | |
| | | | | | | | | | SSKYIAWPL | GST(197) | G13(2) | | |
| | | | | | | | | | QGWQATFG | | | | |
| | | | | | | | | | GGDHPPK | | | | |
| | | | | | | | | | (SEQ ID NO: | | | | |
| | | | | | | | | | 2549)(3)- | | | | |
| | | | | | | | | | ASMTGGQQ | | | | |
| | | | | | | | | | MGR (SEQ ID | | | | |
| | | | | | | | | | NO: 2546)(1) | | | | |
| | | | | | | | | G14 | DFETLKVDF | GST(119) | G14(58) | Seq_ | E2 |
| | | | | | | | | | LSK (SEQ ID | | | 47378 | |
| | | | | | | | | | NO: 2550)(6)- | | | | |
| | | | | | | | | | QAPGKQR | | | | |
| | | | | | | | | | (SEQ ID NO: | | | | |
| | | | | | | | | | 2551)(5) | | | | |
| | | | | | | | | | IAYSKDFETL | GST(113) | G14(90) | | |
| | | | | | | | | | K (SEQ ID | | | | |
| | | | | | | | | | NO: 2552)(5)- | | | | |
| | | | | | | | | | DNAKNTVYL | | | | |
| | | | | | | | | | QMNSLKPED | | | | |
| | | | | | | | | | TAVYYCTVP | | | | |
| | | | | | | | | | HYR (SEQ ID | | | | |
| | | | | | | | | | NO: 2553)(4) | | | | |
| | | | | | | | | | LSCAASGSTF | GST(113) | G14(45) | | |
| | | | | | | | | | DTNPIGWYR | | | | |
| | | | | | | | | | (SEQ ID NO: | | | | |
| | | | | | | | | | 2554)(11)- | | | | |
| | | | | | | | | | IAYSKDFETL | | | | |
| | | | | | | | | | K (SEQ ID | | | | |
| | | | | | | | | | NO: 2552)(5) | | | | |
| | | | | | | | | G15 | / | / | / | / | / |
| | | | | | | | | G16 | / | / | / | / | / |
| | | | | | | | | G17 | / | / | / | / | / |
| | | | | | | | | G18 | / | / | / | / | / |
| | | | | | | | | G19 | / | / | / | / | / |
| | | | | | | | | G20 | / | / | / | / | / |
| | | | | | | | | G21 | / | / | / | / | / |
| | | | | | | | | G22 | / | / | / | / | / |
| | | | | | | | | G23 | / | / | / | / | / |
| | | | | | | | | G24 | / | / | / | / | / |
| | | | | | | | | G25 | / | / | / | / | / |
| | | | | | | | | G26 | / | / | / | / | / |
| | | | | | | | | G27 | / | / | / | / | / |
| | | | | | | | | G28 | / | / | / | / | / |
| | | | | | | | | G29 | / | / | / | / | / |
| | | | | | | | | G30 | / | / | / | / | / |
| | | | | | | | | G31 | / | / | / | / | / |
| | | | | | | | | G32 | / | / | / | / | / |
| | | | | | | | | G33 | / | / | / | / | / |
| | | | | | | | | G34 | / | / | / | / | / |
| | | | | | | | | G35 | / | / | / | / | / |
| | | | | | | | | G36 | / | / | / | / | / |
| | | | | | | | | G37 | / | / | / | / | / |
| | | | | | | | | G38 | / | / | / | / | / |
| | | | | | | | | G39 | / | / | / | / | / |
| | | | | | | | | G40 | / | / | / | / | / |
| | | | | | | | | G41 | / | / | / | / | / |
| | | | | | | | | G42 | / | / | / | / | / |
| | | | | | | | | G43 | / | / | / | / | / |
| | | | | | | | | G44 | DFETLKVDF | GST(119) | G44(58) | Seq_ | E3 |
| | | | | | | | | | LSK (SEQ ID | | | 41521 | |
| | | | | | | | | | NO: 2550)(6)- | | | | |
| | | | | | | | | | QAPGKQR | | | | |
| | | | | | | | | | (SEQ ID NO: | | | | |
| | | | | | | | | | 2551)(5) | | | | |
| | | | | | | | | | IEAIPQIDKYL | GST(191) | G44(79) | | |
| | | | | | | | | | K (SEQ ID | | | | |
| | | | | | | | | | NO: 2555)(9)- | | | | |
| | | | | | | | | | ELVAALTGG | | | | |
| | | | | | | | | | GNTNYADSV | | | | |
| | | | | | | | | | KGR (SEQ ID | | | | |
| | | | | | | | | | NO: 2556)(19) | | | | |
| | | | | | | | | | YLKSSK(SEQ | GST(194) | G44(79) | | |
| | | | | | | | | | ID NO: 2557) | | | | |
| | | | | | | | | | (3)- | | | | |
| | | | | | | | | | ELVAALTGG | | | | |
| | | | | | | | | | GNTNYADSV | | | | |
| | | | | | | | | | KGR (SEQ ID | | | | |
| | | | | | | | | | NO: 2556)(19) | | | | |
| | | | | | | | | | KRIEAIPQID | GST(181) | G44(79) | | |
| | | | | | | | | | K(SEQ ID NO: | | | | |
| | | | | | | | | | 2547)(1)- | | | | |
| | | | | | | | | | ELVAALTGG | | | | |
| | | | | | | | | | GNTNYADSV | | | | |
| | | | | | | | | | KGR (SEQ ID | | | | |
| | | | | | | | | | NO: 2556)(19) | | | | |
| | | | | | | | | G45 | / | / | / | / | / |
| | | | | | | | | G46 | / | / | / | / | / |
| | | | | | | | | G47 | IAYSKDFETL | GST(113) | G47(102 | Seq_ | E2 |
| | | | | | | | | | K(SEQ ID NO: | | | 54055 | |
| | | | | | | | | | 2552)(5)- | | | | |
| | | | | | | | | | DTVDLQMNS | | | | |
| | | | | | | | | | LKPEDTAVY | | | | |
| | | | | | | | | | YCSAK(SEQ | | | | |
| | | | | | | | | | ID NO: | | | | |
| | | | | | | | | | 2558)(11) | | | | |
| | | | | | | | | | IAYSKDFETL | GST(113) | G47(115) | | |
| | | | | | | | | | K (SEQ ID | | | | |
| | | | | | | | | | NO: 2552)(5)- | | | | |
| | | | | | | | | | KYCGSTYNR | | | | |
| | | | | | | | | | (SEQ ID NO: | | | | |
| | | | | | | | | | 2559)(1) | | | | |
| | | | | | | | | | SDLEVLFQGP | GST(222) | G47(91) | | |
| | | | | | | | | | LGSPEFPGR | | | | |
| | | | | | | | | | (SEQ ID NO: | | | | |
| | | | | | | | | | 2545)(4)- | | | | |
| | | | | | | | | | DGAKDTVDL | | | | |
| | | | | | | | | | QMNSLK | | | | |
| | | | | | | | | | (SEQ ID NO: | | | | |
| | | | | | | | | | 2560)(4) | | | | |
| | | | | | | | | | IKGLVQPTR | GST(11) | G47(128) | | |
| | | | | | | | | | (SEQ ID NO: | | | | |
| | | | | | | | | | 2561)(2)- | | | | |
| | | | | | | | | | AEGYDYWG | | | | |
| | | | | | | | | | QGTQVTVSS | | | | |
| | | | | | | | | | EPK(SEQ ID | | | | |
| | | | | | | | | | NO: 2562)(5) | | | | |
| | | | | | | | | G48 | / | / | / | / | / |
| | | | | | | | | G49 | IEAIPQIDKYL | GST(191) | G49(79) | Seq_ | E3 |
| | | | | | | | | | K (SEQ ID | | | 24699 | |
| | | | | | | | | | NO: 2555)(9)- | | | | |
| | | | | | | | | | ELVAAISSGG | | | | |
| | | | | | | | | | SANYADSVK | | | | |
| | | | | | | | | | GR(SEQ ID | | | | |
| | | | | | | | | | NO: 2563)(19) | | | | |
| | | | | | | | | | LERPHRD | GST(239) | G49(90) | | |
| | | | | | | | | | (SEQ IDNO: | | | | |
| | | | | | | | | | 2564)(2)- | | | | |
| | | | | | | | | | DNAKNTVYL | | | | |
| | | | | | | | | | QMNSLKPED | | | | |
| | | | | | | | | | TAVYYCR | | | | |
| | | | | | | | | | (SEQ ID NO: | | | | |
| | | | | | | | | | 2565)(4) | | | | |
| | | | | | | | | | LERPHRD | GST(244) | G49(90) | | |
| | | | | | | | | | (SEQ ID NO: | | | | |
| | | | | | | | | | 2564)(7)- | | | | |
| | | | | | | | | | DNAKNTVYL | | | | |
| | | | | | | | | | QMNSLKPED | | | | |
| | | | | | | | | | TAVYYCR | | | | |
| | | | | | | | | | (SEQ ID NO: | | | | |
| | | | | | | | | | 2565)(4) | | | | |
| | | | | | | | | | LERPHRD(SEQ | GST(244) | G49(101) | | |
| | | | | | | | | | ID NO: | | | | |
| | | | | | | | | | 2564)(7)- | | | | |
| | | | | | | | | | NTVYLQMNS | | | | |
| | | | | | | | | | LKPEDTAVY | | | | |
| | | | | | | | | | YCR (SEQ ID | | | | |
| | | | | | | | | | NO: 2566)(11) | | | | |
| | | | | | | | | | SDLEVLFQGP | GST(233) | G49(79) | | |
| | | | | | | | | | LGSPEFPGR | | | | |
| | | | | | | | | | (SEQ ID NO: | | | | |
| | | | | | | | | | 2545)(15)- | | | | |
| | | | | | | | | | ELVAAISSGG | | | | |
| | | | | | | | | | SANYADSVK | | | | |
| | | | | | | | | | GR (SEQ ID | | | | |
| | | | | | | | | | NO: 2563)(19) | | | | |
| | | | | | | | | | LERPHRD | GST(239) | G49(101) | | |
| | | | | | | | | | (SEQ ID NO: | | | | |
| | | | | | | | | | 2564)(2)- | | | | |
| | | | | | | | | | NTVYLQMNS | | | | |
| | | | | | | | | | LKPEDTAVY | | | | |
| | | | | | | | | | YCR (SEQ ID | | | | |
| | | | | | | | | | NO: 2566)(11) | | | | |
| | | | | | | | | G50 | / | / | / | / | / |
| | | | | | | | | G51 | / | / | / | / | / |
| | | | | | | | | G52 | / | / | / | / | / |
| | | | | | | | | G53 | LLLEYLEEK | GST(27) | G53(80) | Seq_ | E3 |
| | | | | | | | | | YEEHLYER | | | 55403 | |
| | | | | | | | | | (SEQ ID NO: | | | | |
| | | | | | | | | | 2548)(9)- | | | | |
| | | | | | | | | | IYYTESVKGR | | | | |
| | | | | | | | | | (SEQ ID NO: | | | | |
| | | | | | | | | | 2567)(8) | | | | |
| | | | | | | | | | LLLEYLEEK | GST(27) | G53(66) | | |
| | | | | | | | | | YEEHLYER | | | | |
| | | | | | | | | | (SEQ ID NO: | | | | |
| | | | | | | | | | 2548)(9)- | | | | |
| | | | | | | | | | EREIVAAKN | | | | |
| | | | | | | | | | WSGAR(SEQ | | | | |
| | | | | | | | | | ID NO: | | | | |
| | | | | | | | | | 2568)(8) | | | | |
| | | | | | | | | | IKGLVQPTR | GST(11) | G53(66) | | |
| | | | | | | | | | (SEQ ID NO: | | | | |
| | | | | | | | | | 2561)(2)- | | | | |
| | | | | | | | | | EIVAAKNWS | | | | |
| | | | | | | | | | GAR(SEQ ID | | | | |
| | | | | | | | | | NO: 2568)(6) | | | | |
| | | | | | | | | G54 | / | / | / | / | / |
| | | | | | | | | G55 | / | / | / | / | / |
| | | | | | | | | G56 | / | / | / | / | / |
| | | | | | | | | G57 | / | / | / | / | / |
| | | | | | | | | G58 | / | / | / | / | / |
| | | | | | | | | G59 | / | / | / | / | / |
| | | | | | | | | G60 | / | / | / | / | / |
| | | | | | | | | G61 | / | / | / | / | / |
| | | | | | | | | G62 | / | / | / | / | / |
| | | | | | | | | G63 | / | / | / | / | / |
| | | | | | | | | G64 | / | / | / | / | / |
| | | | | | | | | G65 | / | / | / | / | / |
| | | | | | | | | G66 | IEAIPQIDKYL | GST(191) | G66(58) | Seq_ | E3 |
| | | | | | | | | | K (SEQ ID | | | 58516 | |
| | | | | | | | | | NO: 2555)(9)- | | | | |
| | | | | | | | | | QRPGKER | | | | |
| | | | | | | | | | (SEQ ID NO: | | | | |
| | | | | | | | | | 2575)(5) | | | | |
| | | | | | | | | G67 | / | / | / | / | / |
| | | | | | | | | G68 | / | / | / | / | / |
| | | | | | | | | G69 | QAPGKDRDF | GST(194) | G69(58) | Seq_ | E3 |
| | | | | | | | | | VAAINR(SEQ | | | 20239 | |
| | | | | | | | | | ID NO: | | | | |
| | | | | | | | | | 2569)(5)- | | | | |
| | | | | | | | | | YLKSSK (SEQ | | | | |
| | | | | | | | | | ID NO: | | | | |
| | | | | | | | | | 2557)(3) | | | | |
| | | | | | | | | | QAPGKDRDF | GST(191) | G69(58) | | |
| | | | | | | | | | VAAINR (SEQ | | | | |
| | | | | | | | | | ID NO: | | | | |
| | | | | | | | | | 2569)(5)- | | | | |
| | | | | | | | | | RIEAIPQIDK | | | | |
| | | | | | | | | | YLK (SEQ ID | | | | |
| | | | | | | | | | NO: 2537)(10) | | | | |
| | | | | | | | | | NTVYLQLNS | GST(113) | G69(102) | | |
| | | | | | | | | | LKPEDTAVY | | | | |
| | | | | | | | | | YCAAR (SEQ | | | | |
| | | | | | | | | | ID NO: | | | | |
| | | | | | | | | | 2570)(11)- | | | | |
| | | | | | | | | | IAYSKDFETL | | | | |
| | | | | | | | | | K (SEQ ID | | | | |
| | | | | | | | | | NO: 2552)(5) | | | | |
| | | | | | | | | | SGVITNYADS | GST(18 [symbol] | G69 | | |
| | | | | | | | | | VKGR (SEQ | | | | |
| | | | | | | | | | ID NO: | | | | |
| | | | | | | | | | 2571)(12)- | | | | |
| | | | | | | | | | KRIEAIPQID | | | | |
| | | | | | | | | | K (SEQ ID | | | | |
| | | | | | | | | | NO: 2547)(1) | | | | |
| | | | | | | | | G70 | / | / | / | / | / |
| | | | | | | | | G71 | / | / | / | / | / |
| | | | | | | | | G72 | / | / | / | / | / |
| | | | | | | | | G73 | / | / | / | / | / |
| | | | | | | | | G74 | / | / | / | / | / |
| | | | | | | | | G75 | / | / | / | / | / |
| | | | | | | | | G76 | / | / | / | / | / |
| | | | | | | | | G77 | / | / | / | / | / |
| | | | | | | | | G78 | NTVSLQMNS | GST(113) | G78(101) | Seq_ | E2 |
| | | | | | | | | | LKPEDTAVY | | | 6584 | |
| | | | | | | | | | YCNVR (SEQ | | | | |
| | | | | | | | | | ID NO: | | | | |
| | | | | | | | | | 2572)(11)- | | | | |
| | | | | | | | | | IAYSKDFETL | | | | |
| | | | | | | | | | K (SEQ ID | | | | |
| | | | | | | | | | NO: 2552)(5) | | | | |
| | | | | | | | | G79 | / | / | / | / | / |
| | | | | | | | | G80 | DEGDKWR | GST(37) | G80(58) | Seq_ | E3 |
| | | | | | | | | | (SEQ ID NO: | | | 51356 | |
| | | | | | | | | | 2573)(2)- | | | | |
| | | | | | | | | | QAPGKER | | | | |
| | | | | | | | | | (SEQ ID NO: | | | | |
| | | | | | | | | | 2574)(5) | | | | |
| | | | | | | | | | DGGTTYYAD | GST(37) | G80(80) | | |
| | | | | | | | | | SVKGR (SEQ | | | | |
| | | | | | | | | | ID NO: | | | | |
| | | | | | | | | | 2576)(12)- | | | | |
| | | | | | | | | | DEGDKWR | | | | |
| | | | | | | | | | (SEQ ID NO: | | | | |
| | | | | | | | | | 2573)(2) | | | | |
| | | | | | | | | | DPAQVQLVE | GST(181) | G80(13) | | |
| | | | | | | | | | SGGGLVQAG | | | | |
| | | | | | | | | | ASLR (SEQ ID | | | | |
| | | | | | | | | | NO: 2577)(1)- | | | | |
| | | | | | | | | | KRIEAIPQID | | | | |
| | | | | | | | | | K (SEQ ID | | | | |
| | | | | | | | | | NO: 2547)(1) | | | | |
| | | | | | | | | | DEGDKWR | GST(36) | G80(58) | | |
| | | | | | | | | | (SEQ ID NO: | | | | |
| | | | | | | | | | 2573)(1)- | | | | |
| | | | | | | | | | QAPGKER | | | | |
| | | | | | | | | | (SEQ ID NO: | | | | |
| | | | | | | | | | 2574)(5) | | | | |
| | | | | | | | | G81 | / | / | / | / | / |
| | | | | | | | | G82 | DNAKYTTYL | GST(36) | G82(90) | Seq_ | E2 |
| | | | | | | | | | QMNSLKPED | | | 1411 | |
| | | | | | | | | | TAVYYCNVR | | | | |
| | | | | | | | | | (SEQ ID NO: | | | | |
| | | | | | | | | | 2578)(4)- | | | | |
| | | | | | | | | | DEGDKWR | | | | |
| | | | | | | | | | (SEQ ID NO: | | | | |
| | | | | | | | | | 2573)(1) | | | | |
| | | | | | | | | | DPAHVQLVE | GST(113) | G82(13) | | |
| | | | | | | | | | SGGGLVQAG | | | | |
| | | | | | | | | | GSLR (SEQ ID | | | | |
| | | | | | | | | | NO: 2579)(1)- | | | | |
| | | | | | | | | | IAYSKDFETL | | | | |
| | | | | | | | | | KVDFLSK | | | | |
| | | | | | | | | | (SEQ ID NO: | | | | |
| | | | | | | | | | 2580)(5) | | | | |
| | | | | | | | | | DPAHVQLVE | GST(119) | G82(13) | | |
| | | | | | | | | | SGGGLVQAG | | | | |
| | | | | | | | | | GSLR (SEQ ID | | | | |
| | | | | | | | | | NO: 2579)(1)- | | | | |
| | | | | | | | | | DFETLKVDF | | | | |
| | | | | | | | | | LSK (SEQ ID | | | | |
| | | | | | | | | | NO: 2550)(6) | | | | |
| | | | | | | | | | KFELGLEFPN | GST(51) | G82(58) | | |
| | | | | | | | | | LPYYIDGDV | | | | |
| | | | | | | | | | K (SEQ ID | | | | |
| | | | | | | | | | NO: 2581)(7)- | | | | |
| | | | | | | | | | QAPGKQR(SEQ | | | | |
| | | | | | | | | | ID NO: | | | | |
| | | | | | | | | | 2551)(5) | | | | |
| | | | | | | | | G83 | DPAQVQLVE | GST(194) | G83(13) | Seq_ | E1 |
| | | | | | | | | | SGGGLVQAG | | | 22759 | |
| | | | | | | | | | GSLR (SEQ ID | | | | |
| | | | | | | | | | NO: 2582)(1)- | | | | |
| | | | | | | | | | YLKSSK (SEQ | | | | |
| | | | | | | | | | ID NO: | | | | |
| | | | | | | | | | 2557)(3) | | | | |
| | | | | | | | | | DPAQVQLVE | GST(191) | G83(13) | | |
| | | | | | | | | | SGGGLVQAG | | | | |
| | | | | | | | | | GSLR (SEQ ID | | | | |
| | | | | | | | | | NO: 2582)(1)- | | | | |
| | | | | | | | | | RIEAIPQIDK | | | | |
| | | | | | | | | | YLK (SEQ ID | | | | |
| | | | | | | | | | NO: 2537)(10) | | | | |
| | | | | | | | | G84 | / | / | / | / | / |
| | | | | | | | | G85 | / | / | / | / | / |
| | | | | | | | | G86 | / | / | / | / | / |
| | | | | | | | | G87 | / | / | / | / | / |
| | | | | | | | | G88 | / | / | / | / | / |
| | | | | | | | | G89 | / | / | / | / | / |
| | | | | | | | | G90 | MASMTGGQ | GST(2) | G90(13) | Seq_ | E3 |
| | | | | | | | | | QMGRDPAD | | | 13998 | |
| | | | | | | | | | VQLVESGGG | | | | |
| | | | | | | | | | LVQAGGSLR | | | | |
| | | | | | | | | | (SEQ ID NO: | | | | |
| | | | | | | | | | 2583)(13)- | | | | |
| | | | | | | | | | SPILGYWK | | | | |
| | | | | | | | | | (SEQ ID NO: | | | | |
| | | | | | | | | | 2584)(1) | | | | |
| | | | | | | | | G91 | / | / | / | / | / |
| | | | | | | | | G92 | / | / | / | / | / |
| | | | | | | | | G93 | / | / | / | / | / |
| | | | | | | | | G94 | / | / | / | / | / |
| | | | | | | | | G95 | / | / | / | / | / |
| | | | | | | | | G96 | DPADVQLVE | GST(40) | G96(13) | Seq_ | E1 |
| | | | | | | | | | SGGGLVQAG | | | 17861 | |
| | | | | | | | | | GSLK (SEQ ID | | | | |
| | | | | | | | | | NO: 2585)(1)- | | | | |
| | | | | | | | | | YEEHLYERD | | | | |
| | | | | | | | | | EGDKWR | | | | |
| | | | | | | | | | (SEQ ID NO: | | | | |
| | | | | | | | | | 2539)(13) | | | | |
| | | | | | | | | | DPADVQLVE | GST(40) | G96(16) | | |
| | | | | | | | | | SGGGLVQAG | | | | |
| | | | | | | | | | GSLK (SEQ ID | | | | |
| | | | | | | | | | NO: 2585)(4)- | | | | |
| | | | | | | | | | YEEHLYERD | | | | |
| | | | | | | | | | EGDKWR | | | | |
| | | | | | | | | | (SEQ ID NO: | | | | |
| | | | | | | | | | 2539)(13) | | | | |
| | | | | | | | | | LLLEYLEEK | GST(27) | G96(13) | | |
| | | | | | | | | | YEEHLYERD | | | | |
| | | | | | | | | | EGDK (SEQ | | | | |
| | | | | | | | | | ID NO: | | | | |
| | | | | | | | | | 2586)(9)- | | | | |
| | | | | | | | | | DPADVQLVE | | | | |
| | | | | | | | | | SGGGLVQAG | | | | |
| | | | | | | | | | GSLK (SEQ ID | | | | |
| | | | | | | | | | NO: 2585)(1) | | | | |
| | | | | | | | | | DPADVQLVE | GST(9) | G96(13) | | |
| | | | | | | | | | SGGGLVQAG | | | | |
| | | | | | | | | | GSLK (SEQ ID | | | | |
| | | | | | | | | | NO: 2585)(1)- | | | | |
| | | | | | | | | | MSPILGYWKI | | | | |
| | | | | | | | | | K(SEQ ID NO: | | | | |
| | | | | | | | | | 2587)(9) | | | | |
| | | | | | | | | G97 | / | / | / | / | / |
| | | | | | | | | G98 | / | / | / | / | / |

[symbol]

indicates data missing or illegible when filed

TABLE 2
Summary of HSA Nbs and their biophysical and physiochemical properties.

| | | | | | | | | ELISA | | | | | |
|---|---|---|---|---|---|---|---|---|---|---|---|---|---|
| | | | | | | | | affinity | | | | SPR | |
| | | | | salt | lowpH | highpH | | (LogIC50 | Mutant | SPR ka | SPR kd | KD | Cross- |
| ID | Enzyme | Protein Sequence | SEQ ID NO | trend | trend | trend | Soluble | (oD450nm)) | Screening | (1/Ms) | (1/s) | (M) | linker |
| H1 | Trypsin | MASMTGGQQMGRDPGSS | SEQ ID NO: | 2 | 1 | 2 | Yes | 4.916 | / | 9.73E+06 | 1.19E−03 | 1.22E−09 | DSS |
| | | SGSMAQVQLVESGGGLV | 99 | | | | | | | | | | |
| | | QPGGSLRLSCVASGIMFDI | | | | | | | | | | | |
| | | YTMRWYRQAPGKQRELV | | | | | | | | | | | |
| | | AAITGAGRANYNDDSVK | | | | | | | | | | | |
| | | GRFTISRDNAKNTVYLQM | | | | | | | | | | | |
| | | NRMKPEDTALYECNTEIL | | | | | | | | | | | |
| | | GGGPNYWGRGTQVTVSE | | | | | | | | | | | |
| | | PKTPKGGKGGGLEHHHH | | | | | | | | | | | |
| | | HH | | | | | | | | | | | |
| H2 | Trypsin/ | MASMTGGQQMGRDPENL | SEQ ID NO: | 2 | / | 2 | Yes | 5.883 | Decreased | 2.34E+05 | 3.99E−05 | 1.70E−10 | DSS |
| | Chymo | YFQGAQVQLVESGGGLV | 100 | | | | | | | | | | |
| | | QAGGSLRLSCTASGRTFTP | | | | | | | | | | | |
| | | YTIGWFRQAPGKEREFVA | | | | | | | | | | | |
| | | SILWSGINTDYADSVKGRF | | | | | | | | | | | |
| | | AISRDNAKNAAYLQMSNL | | | | | | | | | | | |
| | | KPEDTAVYYCATGGGLG | | | | | | | | | | | |
| | | YYRSVSQYDYWGQGTQV | | | | | | | | | | | |
| | | TVSEPKTPKGGKGGGLEH | | | | | | | | | | | |
| | | HHHHH | | | | | | | | | | | |
| H3 | Chymo | MASMTGGQQMGRDPENL | SEQ ID NO: | 1 | 0 | 2 | Yes | 7 | Decreased | 1.11E+06 | 5.04E−04 | 4.54E−10 | EDC |
| | | YFQGAQVQLVESGGGLV | [symbol] | | | | | | | | | | |
| | | QAGGSLRLSCVASGRTFE | | | | | | | | | | | |
| | | PFVMGWFRQAPGKEREFV | | | | | | | | | | | |
| | | ATISWSGGSLSYADSVKG | | | | | | | | | | | |
| | | RFTVSRDNAKNTVYLQM | | | | | | | | | | | |
| | | NSLKPEDTAVYYCAAAPG | | | | | | | | | | | |
| | | VGNYRYTFQYDYWGQGT | | | | | | | | | | | |
| | | QVTVSEPKTPKGGKGGGL | | | | | | | | | | | |
| | | EHHHHHH | | | | | | | | | | | |
| H4 | Trypsin | MASMTGGQQMGRDPNSA | SEQ ID NO: | 0 | 0 | 2 | Yes | 5.4 | No change | 9.92E+05 | 2.64E−04 | 2.66E−10 | DSS |
| | | HVQLVESGGGLVQTGGSL | 102 | | | | | | | | | | |
| | | RLACAASGRAFSTYAMG | | | | | | | | | | | |
| | | WFRQAPGKEREFVASINR | | | | | | | | | | | |
| | | SGSSTYYADSVKGRFTISR | | | | | | | | | | | |
| | | DNGKDTVYLQMNRLIPED | | | | | | | | | | | |
| | | TAVYYCAADSEGVGFRN | | | | | | | | | | | |
| | | MLEYDYWGQGTQVTVSS | | | | | | | | | | | |
| | | EPKTPKGGCGGGAAALEH | | | | | | | | | | | |
| | | HHHHH | | | | | | | | | | | |
| H5 | Chymo | MASMTGGQQMGRDPNSA | SEQ ID NO: | 1 | 0 | 2 | No | / | / | / | | | / |
| | | EVQLVESGGGLVQAGGSL | | | | | | | | | | | |
| | | RLSCAASGRTFIPYTTGWF | | | | | | | | | | | |
| | | RQTPGKEREFVATITWSGI | | | | | | | | | | | |
| | | STKYADSVKGRFTISRDN | | | | | | | | | | | |
| | | AKNTVYLQMNSLKPEDT | | | | | | | | | | | |
| | | AVYYCTKNPRALALNRD | | | | | | | | | | | |
| | | YWGQGTQVTVSSEPKTPK | | | | | | | | | | | |
| | | GGCGGGAAALEHHHHHH | | | | | | | | | | | |
| H6 | Chymo | MASMTGGQQMGRDPNSA | SEQ ID NO: | 2 | 1 | / | Yes | 2.905 | No change | / | | | DSS |
| | | EVQLVESGGGLVQVGGSL | 104 | | | | | | | | | | |
| | | TLSCAAAGSTFTTNAMA | | | | | | | | | | | |
| | | WFRQFPGKERELVAAISW | | | | | | | | | | | |
| | | GGLGYVADSVRGRFTISR | | | | | | | | | | | |
| | | PTKNMMILQLNSLEREDT | | | | | | | | | | | |
| | | AIYYCAARKMSTVATEAT | | | | | | | | | | | |
| | | MYAYWGHGTQVTVSSEP | | | | | | | | | | | |
| | | KTPKGGCGGGAAALEHH | | | | | | | | | | | |
| | | HHHH | | | | | | | | | | | |
| H7 | Chymo | MASMTGGQQMGRDPNSA | SEQ ID NO: | 1 | 0 | 2 | Yes | 5.621 | No change | 9.35E+04 | 9.79E−05 | 1.09E−09 | DSS |
| | | DVQLVESGGGSVQAGGSL | 105 | | | | | | | | | | |
| | | RLSCAASGGTFSSYAMGW | | | | | | | | | | | |
| | | YRQAPGKEREFVSGISWS | | | | | | | | | | | |
| | | GSSIDYVDSVKGRFTISRD | | | | | | | | | | | |
| | | NAKNTVYLQMNSLKPED | | | | | | | | | | | |
| | | TAVYYCGAADPMGLGYG | | | | | | | | | | | |
| | | LGPRPVDRLLSAECDYWG | | | | | | | | | | | |
| | | QGTQVTVSSEPKTPKGGC | | | | | | | | | | | |
| | | GGAAALEHHHHHH | | | | | | | | | | | |
| H8 | Chymo | MASMTGGQQMGRDPNSA | SEQ ID NO: | / | 0 | 2 | No | / | / | / | | | / |
| | | DVQLVESGGGLVQAGGSL | 106 | | | | | | | | | | |
| | | RLSCAASGRTFSSYAMGW | | | | | | | | | | | |
| | | FRQAPGKEREFVSAISRSG | | | | | | | | | | | |
| | | GSTYYTDSVKGRFTISRDN | | | | | | | | | | | |
| | | AKNTVYLQMNSLKPEDT | | | | | | | | | | | |
| | | AVYYCAAAEGLASGSYD | | | | | | | | | | | |
| | | YTPPLKSSWYDYWGQGT | | | | | | | | | | | |
| | | QVTVSSEPKTPKGGCGGA | | | | | | | | | | | |
| | | AALEHHHHHH | | | | | | | | | | | |
| H9 | Trypsin | MASMTGGQQMGRDPNSA | SEQ ID NO: | 2 | / | 2 | No | / | / | / | | | / |
| | | EVQLVESGGGLVQAGGSL | 107 | | | | | | | | | | |
| | | RLSCVASGRTFSYRAMG | | | | | | | | | | | |
| | | WFHQAPGKEREFVAAVG | | | | | | | | | | | |
| | | SSGLTTYYADSVKGRFTIS | | | | | | | | | | | |
| | | RDNAKNTVYLQMNSLQL | | | | | | | | | | | |
| | | EDTAVYYCAAAKFGYVV | | | | | | | | | | | |
| | | VTAKEYEYWGQGTQVTV | | | | | | | | | | | |
| | | SSEPKTPKGGCGGAAALE | | | | | | | | | | | |
| | | HHHHHH | | | | | | | | | | | |
| H10 | Chymo | MASMTGGQQMGRDPNSA | SEQ ID NO: | 2 | / | / | Yes | 1.462 | / | / | | | / |
| | | DVQLVESGGGLVQAGGSL | 108 | | | | | | | | | | |
| | | RLSCRASGLPFGPYTMGW | | | | | | | | | | | |
| | | FRQTPGQEREFVAAITWSS | | | | | | | | | | | |
| | | MNTNYADSVKGRFTISRD | | | | | | | | | | | |
| | | SAKNTVYLQMNTLKPDD | | | | | | | | | | | |
| | | TAVYYCAADDRAVPMLG | | | | | | | | | | | |
| | | DFEDYIYWGQGTQVTVSS | | | | | | | | | | | |
| | | EPKTPKGGCGGAAALEHH | | | | | | | | | | | |
| | | HHHH | | | | | | | | | | | |
| H11 | Trypsin | MASMTGGQQMGRDPNSA | SEQ ID NO: | 2 | / | 2 | Yes | 6.272 | No change | 2.55E+05 | 1.55E−05 | 6.10E−11 | DSS |
| | | QVQLVESGGGLVQVGGSL | 109 | | | | | | | | | | |
| | | RLSCAASGRTFSNYVMG | | | | | | | | | | | |
| | | WFRQAPGKEREFVAYIHW | | | | | | | | | | | |
| | | SGSSTSYADSVKGRFTISR | | | | | | | | | | | |
| | | DNTKNTMYLQMNSLKPE | | | | | | | | | | | |
| | | DTAVYYCTADQYASTLLR | | | | | | | | | | | |
| | | AAGEYWGQGTQVTVSSE | | | | | | | | | | | |
| | | PKTPKGGCGGAAALEHH | | | | | | | | | | | |
| | | HHHH | | | | | | | | | | | |
| H12 | Chymo | MASMTGGQQMGRDPNSA | SEQ ID NO: | 2 | 0 | / | Yes | 1.617 | No change | / | | | / |
| | | HVQLVESGGGLVQAGGSL | 110 | | | | | | | | | | |
| | | RLSCVSSGRTYRWNAMG | | | | | | | | | | | |
| | | WFRQAPGKEREFVAAIDW | | | | | | | | | | | |
| | | DGRNTDYADSVKGRFTIS | | | | | | | | | | | |
| | | RDNAKNTVFLQMNRLKS | | | | | | | | | | | |
| | | EDTAVYSCALDRVVITSM | | | | | | | | | | | |
| | | RTNFDVWGQGTQVTVSSE | | | | | | | | | | | |
| | | PKTPKGGCGGAAALEHH | | | | | | | | | | | |
| | | HHHH | | | | | | | | | | | |
| H13 | Trypsin | MASMTGGQQMGRDPNSA | SEQ ID NO: | / | / | 2 | Yes | 1.962 | / | / | | | / |
| | | HVQLVESGGGLVQAGGSL | 111 | | | | | | | | | | |
| | | RLSCAASGRTFSTYHMGW | | | | | | | | | | | |
| | | FRQAPGKAREFVAAITGS | | | | | | | | | | | |
| | | GGITYYADSVKGRFTISRD | | | | | | | | | | | |
| | | NAKNTVYLQMNSLKPED | | | | | | | | | | | |
| | | TAVYYCAADTRAYGLVPS | | | | | | | | | | | |
| | | TTSSRYNYWGQGTQVTVS | | | | | | | | | | | |
| | | SEPKTPKGGCGGAAALEH | | | | | | | | | | | |
| | | HHHHH | | | | | | | | | | | |
| H14 | Trypsin | MASMTGGQQMGRDPNSA | SEQ ID NO: | 2 | 1 | 2 | Yes | 5.964 | Decresed | 2.50E+05 | 5.57E−06 | 2.23E−11 | / |
| | | HVQLVESGGGLVQAGGSL | 112 | | | | | | | | | | |
| | | RLSCTASGRTFTPYTMGW | | | | | | | | | | | |
| | | FRQAPGKEREFVASILWS | | | | | | | | | | | |
| | | GNNRDYADSVKDRFAISR | | | | | | | | | | | |
| | | DNAKNTAYLQMNSLKPE | | | | | | | | | | | |
| | | DTAVYYCAAGDGLGFYR | | | | | | | | | | | |
| | | SVNQYDYWGQGTQVTVS | | | | | | | | | | | |
| | | SEPKTPKGGCGGAAALEH | | | | | | | | | | | |
| | | HHHHH | | | | | | | | | | | |
| H15 | Trypsin | MASMTGGQQMGRDPNSA | SEQ ID NO: | 2 | 0 | 0 | Yes | No | / | / | | | / |
| | | QVQLVESGGGLVQAGDSL | 113 | | | | | binding | | | | | |
| | | RLSCAASERTSNYAMGWF | | | | | | | | | | | |
| | | RQAPGKEREFVADINHTG | | | | | | | | | | | |
| | | GRRKYGDSVKGRFTISRD | | | | | | | | | | | |
| | | NAENMVYLQMNNLQVED | | | | | | | | | | | |
| | | TAVYYCATGLRYDVSGY | | | | | | | | | | | |
| | | APDYRYWGRGTQVTVSS | | | | | | | | | | | |
| | | EPKTPKGGCGGAAALEHH | | | | | | | | | | | |
| | | HHHH | | | | | | | | | | | |
| H16 | Chymo | MASMTGGQQMGRDPNSA | SEQ ID NO: | / | 0 | 2 | Yes | 5.986 | No change | 1.34E+06 | 1.16E−04 | 8.62E−11 | / |
| | | QVQLVESGGGLVQTGGSL | 114 | | | | | | | | | | |
| | | TLSCAASGRTFSTKSMGW | | | | | | | | | | | |
| | | FRQAPGKEREFVADINWN | | | | | | | | | | | |
| | | GGITHYADSVEGRFTISRD | | | | | | | | | | | |
| | | NANDMVYLQMNSLKPED | | | | | | | | | | | |
| | | TAVYYCAGGRYSTLFSKS | | | | | | | | | | | |
| | | EADYDYWGQGTQVTVSS | | | | | | | | | | | |
| | | EPKTPKGGCGGAAALEHH | | | | | | | | | | | |
| | | HHHH | | | | | | | | | | | |
| H17 | Trypsin | MASMTGGQQMGRDPNSA | SEQ ID NO: | 2 | 0 | 2 | No | / | / | / | | | / |
| | | QVQLVESGGGLAQAGGSL | 115 | | | | | | | | | | |
| | | RLSCAASGGTFSNSCMGW | | | | | | | | | | | |
| | | FRQAPGMEREFVVIIRSTG | | | | | | | | | | | |
| | | HTTYADSVEGRFTVSREIA | | | | | | | | | | | |
| | | KNTVYLEMNSLKPEDTAV | | | | | | | | | | | |
| | | YVCAAGVSDYGCYRTSGI | | | | | | | | | | | |
| | | NYWGQGTQVTVSSEPKTP | | | | | | | | | | | |
| | | KGGCGGAAALEHHHHHH | | | | | | | | | | | |
| H18 | Trypsin | MASMTGGQQMGRDPNSA | SEQ ID NO: | 23 | 2 | 2 | Yes | 5.646 | Decreased | 1.71E+05 | 8.71E−05 | 5.02E−10 | DSS |
| | | EVQLVESGGGLVQAGGSL | 116 | | | | | | | | | | |
| | | RLSCTASGPKDTPYTMGW | | | | | | | | | | | |
| | | FRQVPGKEREFVASVLWS | | | | | | | | | | | |
| | | GINTDYADSVKGRFAISRN | | | | | | | | | | | |
| | | NAKNTMYLQMNSLKPED | | | | | | | | | | | |
| | | TAVYYCAAGYGLGFYRSI | | | | | | | | | | | |
| | | SQYDYWGHGTQVTVSSEP | | | | | | | | | | | |
| | | KTPKGGCGGAAALEHHH | | | | | | | | | | | |
| | | HHH | | | | | | | | | | | |
| H19 | Trypsin | MASMTGGQQMGRDPNSA | SEQ ID NO: | 2 | 2 | 2 | No | / | / | / | | | / |
| | | HVQLVESGGGLVQAGGSL | 117 | | | | | | | | | | |
| | | RLSCTASGPKDTPYTMGW | | | | | | | | | | | |
| | | FRQVPGKEREFVASVLWS | | | | | | | | | | | |
| | | GINTDYADSVKGRFAISRN | | | | | | | | | | | |
| | | NAKNTMYLQMNSLKPED | | | | | | | | | | | |
| | | TAVYYCAAGYGLGFYRS | | | | | | | | | | | |
| | | VSQHDYWGHGTQVTVSS | | | | | | | | | | | |
| | | EPKTPKGGCGGAAALEHH | | | | | | | | | | | |
| | | HHHH | | | | | | | | | | | |
| H20 | Trypsin | MASMTGGQQMGRDPNSA | SEQ ID NO: | 2 | 2 | 2 | Yes | 5.759 | Decreased | 1.54E+05 | 3.80E−05 | 2.47E−10 | DSS |
| | | EVQLVESGGGLVQAGGSL | 118 | | | | | | | | | | |
| | | RLSCTASGPKDTPYTMGW | | | | | | | | | | | |
| | | FRQVPGKEREFVASVLWS | | | | | | | | | | | |
| | | GINTDYADSVKGRFAISRN | | | | | | | | | | | |
| | | NAKNTMYLQMNSLKPED | | | | | | | | | | | |
| | | TAVYYCAAGYGLGFYRT | | | | | | | | | | | |
| | | VSQYDYWGHGTQVTVSS | | | | | | | | | | | |
| | | EPKTPKGGCGGAAALEHH | | | | | | | | | | | |
| | | HHHH | | | | | | | | | | | |
| | | | | | | | | | | | | | EDC |
| H21 | Trypsin | MASMTGGQQMGRDPNSA | SEQ ID NO: | 1 | 0 | 2 | Yes | 5.628 | No change | 6.83E+05 | 1.82E−04 | 2.66E−10 | DSS |
| | | QVQLVESGGGLVQAGGSL | 119 | | | | | | | | | | |
| | | RLSCAASGYTSGNDAMG | | | | | | | | | | | |
| | | WFRQAPGKEREFVGAIRW | | | | | | | | | | | |
| | | SGVSTYYADSVKGRFTISR | | | | | | | | | | | |
| | | DGAKNTLYLQMNSLKPE | | | | | | | | | | | |
| | | DTAVYYCAAKFTGSAWY | | | | | | | | | | | |
| | | GVQKLESTYWDYWGQGT | | | | | | | | | | | |
| | | QVTVSSEPKTPKGGCGGA | | | | | | | | | | | |
| | | AALEHHHHHH | | | | | | | | | | | |
| H22 | Trypsin | MASMTGGQQMGRDPNSA | SEQ ID NO: | 1 | 0 | 2 | Yes | 4.211 | No change | / | | | DSS |
| | | HVQLVESGGGLVQAGGSL | 120 | | | | | | | | | | |
| | | RLSCTASARTSNAMGWFR | | | | | | | | | | | |
| | | RAPGKERDFVAAISESGRT | | | | | | | | | | | |
| | | TDYADSVKGRFTISRDTA | | | | | | | | | | | |
| | | KNTVYLQMISLKPEDTAV | | | | | | | | | | | |
| | | YYCARKRVADAISSNYEF | | | | | | | | | | | |
| | | RYDYWGQGTQVTVSSEP | | | | | | | | | | | |
| | | KTPKGGCGGAAALEHHH | | | | | | | | | | | |
| | | HHH | | | | | | | | | | | |
| H23 | Chymo | MASMTGGQQMGRDPNSA | SEQ ID NO: | 1 | 0 | 2 | Yes | 1.625 | / | / | | | / |
| | | DVQLVESGGGLVQAGGSL | 121 | | | | | | | | | | |
| | | TLSCAASGRTFSSSTMGW | | | | | | | | | | | |
| | | FRRAPGKEREFVAAISGSA | | | | | | | | | | | |
| | | RTTDYADSVKGRFTISRD | | | | | | | | | | | |
| | | NAKNTVYLQMISLKPEDT | | | | | | | | | | | |
| | | AIYYCARKRVVDVTTSNY | | | | | | | | | | | |
| | | ELRYDYWGQGTQVTVSS | | | | | | | | | | | |
| | | EPKTPKGGCGGAAALEHH | | | | | | | | | | | |
| | | HHHH | | | | | | | | | | | |
| H24 | Chymo | MASMTGGQQMGRDPNSA | SEQ ID NO: | 2 | 2 | / | Yes | No | / | / | | | / |
| | | QVQLVESGGGLVQAGGSL | 122 | | | | | binding | | | | | |
| | | RLSCVSSGRTYRWNAMG | | | | | | | | | | | |
| | | WFRQAPGKEREFVAAIDW | | | | | | | | | | | |
| | | DGRNTDYADSVKGRFTIS | | | | | | | | | | | |
| | | RDNAKNTVYLQMNSLKV | | | | | | | | | | | |
| | | EDTAIYYCAAREWGSGGY | | | | | | | | | | | |
| | | SSIASYAYWGQGTQVTVS | | | | | | | | | | | |
| | | SEPKTPKGGCGGAAALEH | | | | | | | | | | | |
| | | HHHHH | | | | | | | | | | | |
| H25 | Trypsin | MASMTGGQQMGRDPNSA | SEQ ID NO: | 1 | / | 2 | Yes | 5.344 | No change | 9.36E+05 | 8.02E−04 | 8.58E−10 | DSS |
| | | DVQLVESGGGLVQAGGSL | 123 | | | | | | | | | | |
| | | RLSCAASGRTISDYGMAW | | | | | | | | | | | |
| | | FRQAPGKEREFVGVITSNS | | | | | | | | | | | |
| | | VTTYYADSVKGRFTISRD | | | | | | | | | | | |
| | | NTKNTVYLQMISLKPEDT | | | | | | | | | | | |
| | | AIYYCAARIPVGFYYNAR | | | | | | | | | | | |
| | | NYDFWGQGTQVTVSSEPK | | | | | | | | | | | |
| | | TPKGGCGGAAALEHHHH | | | | | | | | | | | |
| | | HH | | | | | | | | | | | |
| H26 | Chymo | MASMTGGQQMGRDPNSA | SEQ ID NO: | 1 | 0 | 2 | Yes | 2.813 | No change | / | | | DSS |
| | | QVQLVESGGGLVQAGGSL | 124 | | | | | | | | | | |
| | | RLSCAASGRTPYVMGWF | | | | | | | | | | | |
| | | RQAPGNEREFVASISWTY | | | | | | | | | | | |
| | | GYTNYANSVKGRFRISKD | | | | | | | | | | | |
| | | NAKNTVLLQMNSLKPEDT | | | | | | | | | | | |
| | | AVYYCAARRGEDPEYDY | | | | | | | | | | | |
| | | WGQGTQVTVSSEPKTPKG | | | | | | | | | | | |
| | | GCGGAAALEHHHHHH | | | | | | | | | | | |
| H27 | Chymo | MASMTGGQQMGRDPNSA | SEQ ID NO: | 2 | / | 0 | Yes | 2.575 | No change | / | | | DSS |
| | | HVQLVESGGGLVQAGGSL | 125 | | | | | | | | | | |
| | | RLSCIASGRTFSTYHMGW | | | | | | | | | | | |
| | | FREAPGKGREFVAAITQN | | | | | | | | | | | |
| | | GGTTYYADSVKGRFTISR | | | | | | | | | | | |
| | | DNAKNTVYLQMGSLKPE | | | | | | | | | | | |
| | | DTAVYYCAASPALIGRIYF | | | | | | | | | | | |
| | | GNENYSWGQGTQVTVSS | | | | | | | | | | | |
| | | EPKTPKGGCGGAAALEHH | | | | | | | | | | | |
| | | HHHH | | | | | | | | | | | |
| H28 | Trypsin | MASMTGGQQMGRDPNSA | SEQ ID NO: | 2 | / | / | Yes | 5.116 | No change | 5.24E+06 | 8.68E−03 | 1.66E−09 | DSS |
| | | DVQLVESGGGLAQAGGSL | 126 | | | | | | | | | | |
| | | RLSCAASGRTFSNECMGW | | | | | | | | | | | |
| | | FRQAPGKEREFVATIRSTG | | | | | | | | | | | |
| | | HISYATSVQGRFTVSRDIA | | | | | | | | | | | |
| | | KNTVYLEMNNLKPEDTA | | | | | | | | | | | |
| | | VYSCGAGVSDYGCYRTSG | | | | | | | | | | | |
| | | YNYWGQGTQVTVSSEPK | | | | | | | | | | | |
| | | TPKGGCGGAAALEHHHH | | | | | | | | | | | |
| | | HH | | | | | | | | | | | |
| H29 | Chymo | MASMTGGQQMGRDPNSA | SEQ ID NO: | 2 | 2 | 1 | Yes | 1.862 | No change | / | | | / |
| | | QVQLVESGGGLVPAGGSL | 127 | | | | | | | | | | |
| | | RLSCAASGRTFSLYRMGW | | | | | | | | | | | |
| | | FRQAPGKEREFVAAIIWSS | | | | | | | | | | | |
| | | GSTYYADSVKGRFTISRDI | | | | | | | | | | | |
| | | AKNTVYLEMNSLKPEDTA | | | | | | | | | | | |
| | | VYSCGAGVSDYGCYRTSG | | | | | | | | | | | |
| | | YAYWGQGTQVTVSSEPK | | | | | | | | | | | |
| | | TPKGGCGGAAALEHHHH | | | | | | | | | | | |
| | | HH | | | | | | | | | | | |
| H30 | Trypsin | MASMTGGQQMGRDPNSA | SEQ ID NO: | / | 0 | 2 | Yes | 5.895 | No change | 1.03E+06 | 1.68E−04 | 1.64E−10 | / |
| | | HVQLVESGGGLAQAGGSL | 128 | | | | | | | | | | |
| | | RLSCAASGGTFSNSCMGW | | | | | | | | | | | |
| | | FRQAPGMEREFVAIIRSTG | | | | | | | | | | | |
| | | HTTYADSVEGRFTVSRDI | | | | | | | | | | | |
| | | AKNTVYLEMNSLKPEDTA | | | | | | | | | | | |
| | | VYSCVAGVSDYGCYRTSG | | | | | | | | | | | |
| | | IKYWGQGTQVTVSSEPKT | | | | | | | | | | | |
| | | PKGGCGGAAALEHHHHH | | | | | | | | | | | |
| | | H | | | | | | | | | | | |
| H31 | Chymo | MASMTGGQQMGRDPNSA | SEQ ID NO: | 0 | 0 | 0 | Yes | 1.075 | / | / | | | / |
| | | QVQLVESGGGLVQPGGSL | 129 | | | | | | | | | | |
| | | RLSCTPSGFRLEDYPIAWF | | | | | | | | | | | |
| | | RQAPGKEREGLSCITSGDG | | | | | | | | | | | |
| | | RTYYEESVKGRFTISRDNA | | | | | | | | | | | |
| | | QNKVYLQMNKLTPEDTA | | | | | | | | | | | |
| | | VYHCATVPSDNLCGYLHR | | | | | | | | | | | |
| | | RPFASWGQGTQVTVSSEP | | | | | | | | | | | |
| | | KTPKGGCGGGAAALEHH | | | | | | | | | | | |
| | | HHHH | | | | | | | | | | | |
| H32 | Chymo | MASMTGGQQMGRDPNSA | SEQ ID NO: | / | 0 | 0 | Yes | 5.335 | / | / | | | / |
| | | HVQLVESGGGLVQAGGSL | 130 | | | | | | | | | | |
| | | RLSCAASDTIDNYARAWF | | | | | | | | | | | |
| | | RQAPGKEREFVAAITWTF | | | | | | | | | | | |
| | | GTPYYTDSVKGRFTISRDD | | | | | | | | | | | |
| | | AKNTVYLQMNSLKPEDT | | | | | | | | | | | |
| | | AVYYCAASLYLPVRTASG | | | | | | | | | | | |
| | | GYRLDTDRPQYWGQGTQ | | | | | | | | | | | |
| | | VTVSSEPKTPKGGCGGGA | | | | | | | | | | | |
| | | AALEHHHHHH | | | | | | | | | | | |
| H33 | Trypsin | MASMTGGQQMGRDPNSA | SEQ ID NO: | 1 | 0 | 0 | Yes | 5.033 | / | / | | | DSS |
| | | HVQLVESGGGLVQAGGSL | [symbol] | | | | | | | | | | |
| | | RLSCAASGRTLSSYDMGW | | | | | | | | | | | |
| | | FRQPPGKEREFVAAITRHD | | | | | | | | | | | |
| | | FNTFYRDSVKGRFTISRDN | | | | | | | | | | | |
| | | AKNTVYLQMNSLKSEDT | | | | | | | | | | | |
| | | AVYFCAARLDPIFASNSEY | | | | | | | | | | | |
| | | APLYDYWGQGTQVTVSS | | | | | | | | | | | |
| | | EPKTPKGGCGGGAAALEH | | | | | | | | | | | |
| | | HHHHH | | | | | | | | | | | |
| H34 | Chymo | MASMTGGQQMGRDPNSA | SEQ ID NO: | 0 | 0 | 0 | Yes | 5.065 | / | / | | | DSS |
| | | QVQLVESGGGLVQAGGSL | 132 | | | | | | | | | | |
| | | RLSCAASGRTLSSYDMGW | | | | | | | | | | | |
| | | FRKAPGKEREFVAAITRH | | | | | | | | | | | |
| | | DYNTYYRDSVKGRFTISR | | | | | | | | | | | |
| | | DNAKNTVYLQMNSLKSE | | | | | | | | | | | |
| | | DTAVYFCAARLDPIFASNS | | | | | | | | | | | |
| | | AYSNLYDYWGQGTQVTV | | | | | | | | | | | |
| | | SSEPKTPKGGCGGGAAAL | | | | | | | | | | | |
| | | EHHHHHH | | | | | | | | | | | |
| H35 | Trypsin | MASMTGGQQMGRDPNSA | SEQ ID NO: | 0 | / | 0 | Yes | No | / | / | | | / |
| | | EVQLVESGGGLVQAGGSL | 133 | | | | | binding | | | | | |
| | | RVSCAVSGISIYHSGWYR | | | | | | | | | | | |
| | | QAPGKERELVAGISRGGS | | | | | | | | | | | |
| | | TNYADSVKGRFTISRDSGE | | | | | | | | | | | |
| | | NTVYLQMNSLKPEDTAV | | | | | | | | | | | |
| | | YYCKIDWDYRGVSQTAW | | | | | | | | | | | |
| | | GQGTQVTVSSEPKTPKGG | | | | | | | | | | | |
| | | CGGGAAALEHHHHHH | | | | | | | | | | | |
| H36 | Chymo | MASMTGGQQMGRDPNSA | SEQ ID NO: | 0 | 1 | 0 | No | / | / | / | | | / |
| | | EVQLVESGGGLVQAGGSL | 134 | | | | | | | | | | |
| | | RLSCAAPAIALADYAIGW | | | | | | | | | | | |
| | | FRQGPGKEREGISCVASET | | | | | | | | | | | |
| | | DTTRYADSVKGRFTISRD | | | | | | | | | | | |
| | | NAKNLVYLQMNSLKPDD | | | | | | | | | | | |
| | | TAVYYCATEVMECRGLS | | | | | | | | | | | |
| | | YNAWGSWGQGTQVTVSS | | | | | | | | | | | |
| | | EPKTPKGGCGGGAAALEH | | | | | | | | | | | |
| | | HHHHH | | | | | | | | | | | |
| H37 | Chymo | MASMTGGQQMGRDPNSA | SEQ ID NO: | 2 | 0 | 1 | Yes | 1.49 | / | / | | | / |
| | | QVQLVESGGGLVQAGGSL | 135 | | | | | | | | | | |
| | | RLSCAASGLTFSNYALGW | | | | | | | | | | | |
| | | FRRAPGKERDFVAAISYSG | | | | | | | | | | | |
| | | GSTDYADSVKGRFTISRD | | | | | | | | | | | |
| | | NAKNTVYLQMNSLKPED | | | | | | | | | | | |
| | | TAVYYCAAAYLGWGTAR | | | | | | | | | | | |
| | | TAYEYWGQGTQVTVSSEP | | | | | | | | | | | |
| | | KTPKGGCGGGAAALEHH | | | | | | | | | | | |
| | | HHHH | | | | | | | | | | | |
| H38 | Chymo | MASMTGGQQMGRDPNSA | SEQ ID NO: | 0 | / | 1 | Yes | 2.435 | / | / | | | / |
| | | HVQLVESGGGLVQAGGSL | 136 | | | | | | | | | | |
| | | RLSCAASELTFSNYAMGW | | | | | | | | | | | |
| | | FRRAPGKERGFVAAISYSG | | | | | | | | | | | |
| | | GSTDYADSVKGRFTISRD | | | | | | | | | | | |
| | | NAKKTVYLQMNSLKPED | | | | | | | | | | | |
| | | TAVYYCAAAYMGWGTA | | | | | | | | | | | |
| | | RSAYEYWGQGTQVTVSSE | | | | | | | | | | | |
| | | PKTPKGGCGGGAAALEH | | | | | | | | | | | |
| | | HHHHH | | | | | | | | | | | |
| H39 | Chymo | MASMTGGQQMGRDPNSA | SEQ ID NO: | / | / | 1 | Yes | 5.196 | / | / | | | EDC |
| | | QVQLVESGGGLVQAGVSL | 137 | | | | | | | | | | |
| | | RLSCAASERTFSSYIMGWF | | | | | | | | | | | |
| | | RQAPGKEREFIAAISWSGG | | | | | | | | | | | |
| | | NTDYAGSVQGRFTISRDN | | | | | | | | | | | |
| | | AQNTVYLQMNSLEPEDTA | | | | | | | | | | | |
| | | VYYCAADATHSWSYGSR | | | | | | | | | | | |
| | | WYDRNYNYWGQGTQVT | | | | | | | | | | | |
| | | VSSEPKTPKGGCGGGAAA | | | | | | | | | | | |
| | | LEHHHHHH | | | | | | | | | | | |
| H40 | Chymo | MASMTGGQQMGRDPNSA | SEQ ID NO: | / | / | 1 | Yes | 3.156 | / | / | | | DSS |
| | | EVQLVESGGGLVQAGASL | 138 | | | | | | | | | | |
| | | RLSCAASGGTFSSYIMGW | | | | | | | | | | | |
| | | FRQAPGKEREFVAAISWS | | | | | | | | | | | |
| | | GRSTHYADSVKGRFAISR | | | | | | | | | | | |
| | | DNDRVYLQMNSLKPEDT | | | | | | | | | | | |
| | | AVYSCAADPNYTWRDDR | | | | | | | | | | | |
| | | YYREEGYTYWGQGTQVT | | | | | | | | | | | |
| | | VSSEPKTPKGGCGGGAAA | | | | | | | | | | | |
| | | LEHHHHHH | | | | | | | | | | | |
| H41 | Chymo | MASMTG | SEQ ID NO: | 1 | / | 1 | No | / | / | / | | | / |
| | | GQQMGR | [symbol] | | | | | | | | | | |
| | | DPNSAQV | | | | | | | | | | | |
| | | QLVESGG | | | | | | | | | | | |
| | | GLVQASS | | | | | | | | | | | |
| | | SLRLSCA | | | | | | | | | | | |
| | | ASGLTFS | | | | | | | | | | | |
| | | NYAMGW | | | | | | | | | | | |
| | | FRQAPGK | | | | | | | | | | | |
| | | EREFVVAI | | | | | | | | | | | |
| | | SRGGNTY | | | | | | | | | | | |
| H42 | Chymo | MASMTGGQ | SEQ ID NO: | 0 | / | 1 | Yes | 4.922 | / | / | | | DSS |
| | | QMGRDPNSA | 140 | | | | | | | | | | |
| | | HVQLVESGG | | | | | | | | | | | |
| | | GLVQAGGSL | | | | | | | | | | | |
| | | RLSCAASGL | | | | | | | | | | | |
| | | TFSNYAMG | | | | | | | | | | | |
| | | WFRQAPGKE | | | | | | | | | | | |
| | | REFVVAISW | | | | | | | | | | | |
| | | SGANTYYSD | | | | | | | | | | | |
| | | SVKGRFTAS | | | | | | | | | | | |
| | | RDNAKKTVY | | | | | | | | | | | |
| H43 | Chymo | MASMTGGQQ | SEQ ID NO: | 2 | 0 | 1 | Yes | No | / | / | | | / |
| | | MGRDPNSAH | 141 | | | | | binding | | | | | |
| | | VQLVESGGG | | | | | | | | | | | |
| | | LVQAGGSLR | | | | | | | | | | | |
| | | LSCAASGLTF | | | | | | | | | | | |
| | | SNYALGWFR | | | | | | | | | | | |
| | | RAPGKERDF | | | | | | | | | | | |
| | | VAAISYSGGS | | | | | | | | | | | |
| | | TDYADSVKG | | | | | | | | | | | |
| | | RFTISRDNAK | | | | | | | | | | | |
| | | NTVYLQMNS | | | | | | | | | | | |
| H44 | Chymo | MASMTGGQ | SEQ ID NO: | 2 | 1 | 1 | Yes | 5.622 | / | / | | | / |
| | | QMGRDPNS | 142 | | | | | | | | | | |
| | | AEVQLVESG | | | | | | | | | | | |
| | | GGLAQAGGS | | | | | | | | | | | |
| | | LRLSCAASG | | | | | | | | | | | |
| | | GTFSNSCMG | | | | | | | | | | | |
| | | WFRQAPGM | | | | | | | | | | | |
| | | EREFVAIIRS | | | | | | | | | | | |
| | | TGHTTYADS | | | | | | | | | | | |
| | | VEGRFTVSR | | | | | | | | | | | |
| | | DIAKNTVYL | | | | | | | | | | | |
| | | | | | | | | | | | | | CX |
| | | | | | | | | | Cross- | CX | CX | CX | Model |
| | | | | | | | | | linked | residue | residue | Model | Epi- |
| | | | | | | | | ID | Peptides | on Nbs | on HSA | Folder | tope |
| | | | | | | | | H1 | SLHTLFGDKL | H1 (98) | HSA(97) | Seq_ | E1 |
| | | | | | | | | | CTVATLR | | | 16529 | |
| | | | | | | | | | (SEQ ID NO: | | | | |
| | | | | | | | | | 2588)(9)- | | | | |
| | | | | | | | | | DNAKNTVYL | | | | |
| | | | | | | | | | QMNR (SEQ | | | | |
| | | | | | | | | | ID NO: | | | | |
| | | | | | | | | | 2589)(4) | | | | |
| | | | | | | | | | DNAKNTVYL | H1 (98) | HSA(249) | | |
| | | | | | | | | | QMNR (SEQ | | | | |
| | | | | | | | | | ID NO: | | | | |
| | | | | | | | | | 2589)(4)- | | | | |
| | | | | | | | | | FPKAEFAEVS | | | | |
| | | | | | | | | | K (SEQ ID NO: | | | | |
| | | | | | | | | | 2590)(3) | | | | |
| | | | | | | | | | ANYNDDSVK | H1 (86) | HSA(161) | | |
| | | | | | | | | | GR (SEQ ID | | | | |
| | | | | | | | | | NO: 2591)(9)- | | | | |
| | | | | | | | | | KYLYEIAR | | | | |
| | | | | | | | | | (SEQ ID NO: | | | | |
| | | | | | | | | | 2592)(1) | | | | |
| | | | | | | | | H2 | SVSQYDYWG | H2 (127) | HSA(375) | Seq_ | E2 |
| | | | | | | | | | QGTQVTVSE | | | 8598 | |
| | | | | | | | | | PKTPK (SEQ | | | | |
| | | | | | | | | | ID NO: | | | | |
| | | | | | | | | | 2593)(20)- | | | | |
| | | | | | | | | | LAKTYETTLE | | | | |
| | | | | | | | | | K (SEQ ID NO: | | | | |
| | | | | | | | | | 2594)(3) | | | | |
| | | | | | | | | | DNAKNAAYL | H2 (77) | HSA(438) | | |
| | | | | | | | | | QMSNLKPED | | | | |
| | | | | | | | | | TAVYYCATG | | | | |
| | | | | | | | | | GGLGYYR | | | | |
| | | | | | | | | | (SEQ ID NO: | | | | |
| | | | | | | | | | 2595)(4)- | | | | |
| | | | | | | | | | KVPQVSTPTL | | | | |
| | | | | | | | | | VEVSR (SEQ | | | | |
| | | | | | | | | | ID NO: | | | | |
| | | | | | | | | | 2596)(1) | | | | |
| | | | | | | | | H3 | YTFQYDYWG | HS (134) | HSA(402) | Seq_ | E2 |
| | | | | | | | | | QGTQVTVSE | | | 14034 | |
| | | | | | | | | | PK (SEQ ID | | | | |
| | | | | | | | | | NO: 2597)(6)- | | | | |
| | | | | | | | | | VFDEFKPLVE | | | | |
| | | | | | | | | | EPQNLIK | | | | |
| | | | | | | | | | (SEQ ID NO: | | | | |
| | | | | | | | | | 2598)(6) | | | | |
| | | | | | | | | | YTFQYDYWG | H3 (134) | HSA(565) | | |
| | | | | | | | | | QGTQVTVSE | | | | |
| | | | | | | | | | PK (SEQ ID | | | | |
| | | | | | | | | | NO: 2597)(6)- | | | | |
| | | | | | | | | | ATKEQLK | | | | |
| | | | | | | | | | (SEQ ID NO: | | | | |
| | | | | | | | | | 2599)(3) | | | | |
| | | | | | | | | | DPENLYFQG | H3 (13) | HSA(383) | | |
| | | | | | | | | | AQVQLVESG | | | | |
| | | | | | | | | | GGLVQAGGS | | | | |
| | | | | | | | | | LR (SEQ ID | | | | |
| | | | | | | | | | NO: 2600)(1)- | | | | |
| | | | | | | | | | TYETTLEKCC | | | | |
| | | | | | | | | | AAADPHECY | | | | |
| | | | | | | | | | AK (SEQ ID | | | | |
| | | | | | | | | | NO: 2601)(8) | | | | |
| | | | | | | | | H4 | VFDEFKPLVE | H4 (82) | HSA(402) | Seq_ | E2 |
| | | | | | | | | | EPQNLIK | | | 29830 | |
| | | | | | | | | | (SEQ ID NO: | | | | |
| | | | | | | | | | 2598)(6)- | | | | |
| | | | | | | | | | SGSSTYYADS | | | | |
| | | | | | | | | | VKGR (SEQ | | | | |
| | | | | | | | | | ID NO: | | | | |
| | | | | | | | | | 2602)(12) | | | | |
| | | | | | | | | | CCAAADPHE | H4 (82) | HSA(396) | | |
| | | | | | | | | | CYAKVFDEF | | | | |
| | | | | | | | | | KPLVEEPQNL | | | | |
| | | | | | | | | | IK (SEQ ID | | | | |
| | | | | | | | | | NO: 2628)(13)- | | | | |
| | | | | | | | | | SGSSTYYADS | | | | |
| | | | | | | | | | VKGR (SEQ | | | | |
| | | | | | | | | | ID NO: | | | | |
| | | | | | | | | | 2602)(12) | | | | |
| | | | | | | | | | VFDEFKPLVE | H4 (79) | HSA(402) | | |
| | | | | | | | | | EPQNLIK | | | | |
| | | | | | | | | | (SEQ ID NO: | | | | |
| | | | | | | | | | 2598)(6)- | | | | |
| | | | | | | | | | SGSSTYYADS | | | | |
| | | | | | | | | | VK (SEQ ID | | | | |
| | | | | | | | | | NO: 2603)(9) | | | | |
| | | | | | | | | | VFDEFKPLVE | H4 (82) | HSA(406) | | |
| | | | | | | | | | EPQNLIK | | | | |
| | | | | | | | | | (SEQ ID NO: | | | | |
| | | | | | | | | | 2598)(10)- | | | | |
| | | | | | | | | | SGSSTYYADS | | | | |
| | | | | | | | | | VKGR (SEQ | | | | |
| | | | | | | | | | ID NO: | | | | |
| | | | | | | | | | 2602)(12) | | | | |
| | | | | | | | | H5 | / | / | / | / | / |
| | | | | | | | | H6 | KMSTVATEA | H6 (115) | HSA(341) | Seq_ | E2 |
| | | | | | | | | | TMYAYWGH | | | 35308 | |
| | | | | | | | | | GTQVTVSSEP | | | | |
| | | | | | | | | | K (SEQ ID NO: | | | | |
| | | | | | | | | | 2604)(1)- | | | | |
| | | | | | | | | | DVCKNYAEA | | | | |
| | | | | | | | | | K (SEQ ID NO: | | | | |
| | | | | | | | | | 2605)(4) | | | | |
| | | | | | | | | H7 | DNAKNTVYL | H7 (93) | HSA(28) | Seq_ | E3 |
| | | | | | | | | | QMNSLKPED | | | 45799 | |
| | | | | | | | | | TAVYYCGAA | | | | |
| | | | | | | | | | DPMGLGYGL | | | | |
| | | | | | | | | | GPRPVDR | | | | |
| | | | | | | | | | (SEQ ID NO: | | | | |
| | | | | | | | | | 2606)(4)- | | | | |
| | | | | | | | | | RDAHKSEVA | | | | |
| | | | | | | | | | HR (SEQ ID | | | | |
| | | | | | | | | | NO: 2607)(5) | | | | |
| | | | | | | | | | EREFVSGISW | H7 (82) | HSA(300) | | |
| | | | | | | | | | SGSSIDYVDS | | | | |
| | | | | | | | | | VKGR (SEQ | | | | |
| | | | | | | | | | ID NO: | | | | |
| | | | | | | | | | 2608)(22)- | | | | |
| | | | | | | | | | LKECCEK | | | | |
| | | | | | | | | | (SEQ ID NO: | | | | |
| | | | | | | | | | 2609)(2) | | | | |
| | | | | | | | | H8 | / | / | / | / | / |
| | | | | | | | | H9 | / | / | / | / | / |
| | | | | | | | | H10 | / | / | / | / | / |
| | | | | | | | | H11 | EFVAYIHWS | H11 (82) | HSA(565) | Seq_ | E4 |
| | | | | | | | | | GSSTSYADSV | | | 20104 | |
| | | | | | | | | | KGR (SEQ ID | | | | |
| | | | | | | | | | NO: 2610)(20)- | | | | |
| | | | | | | | | | ATKEQLK | | | | |
| | | | | | | | | | (SEQ ID NO: | | | | |
| | | | | | | | | | 2599)(3) | | | | |
| | | | | | | | | | DNTKNTMYL | H11 (93) | HSA(581) | | |
| | | | | | | | | | QMNSLKPED | | | | |
| | | | | | | | | | TAVYYCTAD | | | | |
| | | | | | | | | | QYASTLLR | | | | |
| | | | | | | | | | (SEQ ID NO: | | | | |
| | | | | | | | | | 2611)(4)- | | | | |
| | | | | | | | | | AVMDDFAAF | | | | |
| | | | | | | | | | VEKCCK | | | | |
| | | | | | | | | | (SEQ ID NO: | | | | |
| | | | | | | | | | 2612)(12) | | | | |
| | | | | | | | | | DNTKNTMYL | H11 (93) | HSA(584) | | |
| | | | | | | | | | QMNSLKPED | | | | |
| | | | | | | | | | TAVYYCTAD | | | | |
| | | | | | | | | | QYASTLLR | | | | |
| | | | | | | | | | (SEQ ID NO: | | | | |
| | | | | | | | | | 2611)(4)- | | | | |
| | | | | | | | | | CCKADDKET | | | | |
| | | | | | | | | | CFAEEGK | | | | |
| | | | | | | | | | (SEQ ID NO: | | | | |
| | | | | | | | | | 2613)(3) | | | | |
| | | | | | | | | H12 | / | / | / | / | / |
| | | | | | | | | H13 | / | / | / | / | / |
| | | | | | | | | H14 | / | / | / | / | / |
| | | | | | | | | H15 | / | / | / | / | / |
| | | | | | | | | H16 | / | / | / | / | / |
| | | | | | | | | H17 | / | / | / | / | / |
| | | | | | | | | H18 | LSCTASGPKD | H18 (45) | HSA(375) | Seq_ | E2 |
| | | | | | | | | | TPYTMGWFR | | | 45285 | |
| | | | | | | | | | (SEQ ID NO: | | | | |
| | | | | | | | | | 2614)(9)- | | | | |
| | | | | | | | | | LAKTYETTLE | | | | |
| | | | | | | | | | K (SEQ ID NO: | | | | |
| | | | | | | | | | 2594)(3) | | | | |
| | | | | | | | | | LSCTASGPKD | H18(45) | HSA(438) | | |
| | | | | | | | | | TPYTMGWFR | | | | |
| | | | | | | | | | (SEQ ID NO: | | | | |
| | | | | | | | | | 2614)(9)- | | | | |
| | | | | | | | | | KVPQVSTPTL | | | | |
| | | | | | | | | | VEVSR (SEQ | | | | |
| | | | | | | | | | ID NO: | | | | |
| | | | | | | | | | 2596)(1) | | | | |
| | | | | | | | | | LSCTASGPKD | H18(45) | HSA(499) | | |
| | | | | | | | | | TPYTMGWFR | | | | |
| | | | | | | | | | (SEQ ID NO: | | | | |
| | | | | | | | | | 2614)(9)- | | | | |
| | | | | | | | | | VTKCCTESL | | | | |
| | | | | | | | | | VNR (SEQ ID | | | | |
| | | | | | | | | | NO: 2615)(3) | | | | |
| | | | | | | | | | LSCTASGPKD | H18*45) | HSA(565) | | |
| | | | | | | | | | TPYTMGWFR | | | | |
| | | | | | | | | | (SEQ ID NO: | | | | |
| | | | | | | | | | 2614)(9)- | | | | |
| | | | | | | | | | ATKEQLK | | | | |
| | | | | | | | | | (SEQ ID NO: | | | | |
| | | | | | | | | | 2599)(3) | | | | |
| | | | | | | | | | LSCTASGPKD | H18(45) | HSA(516) | | |
| | | | | | | | | | TPYTMGWFR | | | | |
| | | | | | | | | | (SEQ ID NO: | | | | |
| | | | | | | | | | 2614)(9)- | | | | |
| | | | | | | | | | RPCFSALEVD | | | | |
| | | | | | | | | | ETYVPK (SEQ | | | | |
| | | | | | | | | | ID NO: | | | | |
| | | | | | | | | | 2616)(8) | | | | |
| | | | | | | | | | DPNSAEVQL | H18(13) | HSA(375) | | |
| | | | | | | | | | VESGGGLVQ | | | | |
| | | | | | | | | | AGGSLR (SEQ | | | | |
| | | | | | | | | | ID NO: | | | | |
| | | | | | | | | | 2617)(1)- | | | | |
| | | | | | | | | | LAKTYETTLE | | | | |
| | | | | | | | | | K (SEQ ID NO: | | | | |
| | | | | | | | | | 2594)(3) | | | | |
| | | | | | | | | | DPNSAEVQL | H18(18) | HSA(499) | | |
| | | | | | | | | | VESGGGLVQ | | | | |
| | | | | | | | | | AGGSLR (SEQ | | | | |
| | | | | | | | | | ID NO: | | | | |
| | | | | | | | | | 2617)(6)- | | | | |
| | | | | | | | | | VTKCCTESL | | | | |
| | | | | | | | | | VNR (SEQ ID | | | | |
| | | | | | | | | | NO: 2615)(3) | | | | |
| | | | | | | | | | DPNSAEVQL | H18(13) | HSA(499) | | |
| | | | | | | | | | VESGGGLVQ | | | | |
| | | | | | | | | | AGGSLR (SEQ | | | | |
| | | | | | | | | | ID NO: | | | | |
| | | | | | | | | | 2617)(1)- | | | | |
| | | | | | | | | | VTKCCTESL | | | | |
| | | | | | | | | | VNR (SEQ ID | | | | |
| | | | | | | | | | NO: 2615)(3) | | | | |
| | | | | | | | | | LSCTASGPKD | H18(45) | HSA(407) | | |
| | | | | | | | | | TPYTMGWFR | | | | |
| | | | | | | | | | (SEQ ID NO: | | | | |
| | | | | | | | | | 2614)(9)- | | | | |
| | | | | | | | | | VFDEFKPLVE | | | | |
| | | | | | | | | | EPQNLIK | | | | |
| | | | | | | | | | (SEQ ID NO: | | | | |
| | | | | | | | | | 2598)(11) | | | | |
| | | | | | | | | | LSCTASGPKD | H18(45) | HSA(503) | | |
| | | | | | | | | | TPYTMGWFR | | | | |
| | | | | | | | | | (SEQ ID NO: | | | | |
| | | | | | | | | | 2614)(9)- | | | | |
| | | | | | | | | | CCTESLVNR | | | | |
| | | | | | | | | | (SEQ ID NO: | | | | |
| | | | | | | | | | 2618)(4) | | | | |
| | | | | | | | | H19 | / | / | / | / | / |
| | | | | | | | | H20 | LSCTASGPKD | H20(45) | HSA(375) | Seq_ | E2 |
| | | | | | | | | | TPYTMGWFR | | | 45284 | |
| | | | | | | | | | (SEQ ID NO: | | | | |
| | | | | | | | | | 2614)(9)- | | | | |
| | | | | | | | | | LAKTYETTLE | | | | |
| | | | | | | | | | K (SEQ ID NO: | | | | |
| | | | | | | | | | 2594)(3) | | | | |
| | | | | | | | | | LSCTASGPKD | H20(45) | HSA(499) | | |
| | | | | | | | | | TPYTMGWFR | | | | |
| | | | | | | | | | (SEQ ID NO: | | | | |
| | | | | | | | | | 2614)(9)- | | | | |
| | | | | | | | | | VTKCCTESL | | | | |
| | | | | | | | | | VNR (SEQ ID | | | | |
| | | | | | | | | | NO: 2615)(3) | | | | |
| | | | | | | | | | LSCTASGPKD | H20(45) | HSA(438) | | |
| | | | | | | | | | TPYTMGWFR | | | | |
| | | | | | | | | | (SEQ ID NO: | | | | |
| | | | | | | | | | 2614)(9)- | | | | |
| | | | | | | | | | KVPQVSTPTL | | | | |
| | | | | | | | | | VEVSR (SEQ | | | | |
| | | | | | | | | | ID NO: | | | | |
| | | | | | | | | | 2596)(1) | | | | |
| | | | | | | | | | LSCTASGPKD | H20 [symbol] | HSA [symbol] | | |
| | | | | | | | | | TPYTMGWFR | | | | |
| | | | | | | | | | (SEQ ID NO: | | | | |
| | | | | | | | | | 2614)(9)- | | | | |
| | | | | | | | | | RPCFSALEVD | | | | |
| | | | | | | | | | ETYVPK (SEQ | | | | |
| | | | | | | | | | ID NO: | | | | |
| | | | | | | | | | 2616)(8) | | | | |
| | | | | | | | | | DPNSAEVQL | H20(13) | HSA(375) | | |
| | | | | | | | | | VESGGGLVQ | | | | |
| | | | | | | | | | AGGSLR (SEQ | | | | |
| | | | | | | | | | ID NO: | | | | |
| | | | | | | | | | 2617)(1)- | | | | |
| | | | | | | | | | LAKTYETTLE | | | | |
| | | | | | | | | | K (SEQ ID NO: | | | | |
| | | | | | | | | | 2594)(3) | | | | |
| | | | | | | | | | DPNSAEVQL | H20(18) | HSA(499) | | |
| | | | | | | | | | VESGGGLVQ | | | | |
| | | | | | | | | | AGGSLR (SEQ | | | | |
| | | | | | | | | | ID NO: | | | | |
| | | | | | | | | | 2617)(6)- | | | | |
| | | | | | | | | | VTKCCTESL | | | | |
| | | | | | | | | | VNR (SEQ ID | | | | |
| | | | | | | | | | NO: 2615)(3) | | | | |
| | | | | | | | | | DPNSAEVQL | H20(13) | HSA(499) | | |
| | | | | | | | | | VESGGGLVQ | | | | |
| | | | | | | | | | AGGSLR (SEQ | | | | |
| | | | | | | | | | ID NO: | | | | |
| | | | | | | | | | 2617)(1)- | | | | |
| | | | | | | | | | VTKCCTESL | | | | |
| | | | | | | | | | VNR (SEQ ID | | | | |
| | | | | | | | | | NO: 2615)(3) | | | | |
| | | | | | | | | H21 | WSGVSTYYA | H21(82) | HSA(300) | Seq_ | E5 |
| | | | | | | | | | DSVKGR | | | 6523 | |
| | | | | | | | | | (SEQ ID NO: | | | | |
| | | | | | | | | | 2619)(13)- | | | | |
| | | | | | | | | | LKECCEK | | | | |
| | | | | | | | | | (SEQ ID NO: | | | | |
| | | | | | | | | | 2609)(2) | | | | |
| | | | | | | | | | DGAKNTLYL | H21(93) | HSA(198) | | |
| | | | | | | | | | QMNSLKPED | | | | |
| | | | | | | | | | TAVYYCAAK | | | | |
| | | | | | | | | | (SEQ ID NO: | | | | |
| | | | | | | | | | 2620)(4)- | | | | |
| | | | | | | | | | AAFTECCQA | | | | |
| | | | | | | | | | ADKAACLLP | | | | |
| | | | | | | | | | K (SEQ ID NO: | | | | |
| | | | | | | | | | 2621)(12) | | | | |
| | | | | | | | | H22 | TPKGGCGGA | H22(147) | HSA(236) | Seq_ | E3 |
| | | | | | | | | | AALEHHHHH | | | 2558 | |
| | | | | | | | | | H (SEQ ID NO: | | | | |
| | | | | | | | | | 2622)(3)- | | | | |
| | | | | | | | | | AFKAWAVA | | | | |
| | | | | | | | | | R (SEQ ID NO: | | | | |
| | | | | | | | | | 2623)(3) | | | | |
| | | | | | | | | H23 | / | / | / | / | / |
| | | | | | | | | H24 | / | / | / | / | / |
| | | | | | | | | H25 | NYDFWGQGT | H25(144) | HSA(161) | Seq_ | E3 |
| | | | | | | | | | QVTVSSEPKT | | | 4162 | |
| | | | | | | | | | PK (SEQ ID | | | | |
| | | | | | | | | | NO: 2623)(18)- | | | | |
| | | | | | | | | | KYLYEIAR | | | | |
| | | | | | | | | | (SEQ ID NO: | | | | |
| | | | | | | | | | 2592)(1) | | | | |
| | | | | | | | | H26 | LAKTYETTLE | H26(87) | HSA(375) | Seq_ | E2 |
| | | | | | | | | | K (SEQ ID NO: | | | 18634 | |
| | | | | | | | | | 2594)(3)- | | | | |
| | | | | | | | | | ISKDNAK | | | | |
| | | | | | | | | | (SEQ ID NO: | | | | |
| | | | | | | | | | 2625)(3) | | | | |
| | | | | | | | | | VFDEFKPLVE | H26(87) | HSA(402) | | |
| | | | | | | | | | EPQNLIK | | | | |
| | | | | | | | | | (SEQ ID NO: | | | | |
| | | | | | | | | | 2598)(6)- | | | | |
| | | | | | | | | | ISKDNAK | | | | |
| | | | | | | | | | (SEQ ID NO: | | | | |
| | | | | | | | | | 2625)(3) | | | | |
| | | | | | | | | | DNAKNTVLL | H26(91) | HSA(402) | | |
| | | | | | | | | | QMNSLKPED | | | | |
| | | | | | | | | | TAVYYCAAR | | | | |
| | | | | | | | | | (SEQ ID NO: | | | | |
| | | | | | | | | | 2626)(4)- | | | | |
| | | | | | | | | | VFDEFKPLVE | | | | |
| | | | | | | | | | EPQNLIK | | | | |
| | | | | | | | | | (SEQ ID NO: | | | | |
| | | | | | | | | | 2598)(6) | | | | |
| | | | | | | | | | NTVLLQMNS | H26(102) | HSA(375) | | |
| | | | | | | | | | LKPEDTAVY | | | | |
| | | | | | | | | | YCAAR (SEQ | | | | |
| | | | | | | | | | ID NO: | | | | |
| | | | | | | | | | 2627)(11)- | | | | |
| | | | | | | | | | LAKTYETTLE | | | | |
| | | | | | | | | | K (SEQ ID NO: | | | | |
| | | | | | | | | | 2594)(3) | | | | |
| | | | | | | | | | TYETTLEKCC | H26(87) | HSA(383) | | |
| | | | | | | | | | AAADPHECY | | | | |
| | | | | | | | | | AK (SEQ ID | | | | |
| | | | | | | | | | NO: 2601)(8)- | | | | |
| | | | | | | | | | ISKDNAK | | | | |
| | | | | | | | | | (SEQ ID NO: | | | | |
| | | | | | | | | | 2625)(3) | | | | |
| | | | | | | | | | CCAAADPHE | H26(87) | HSA(396) | | |
| | | | | | | | | | CYAKVFDEF | | | | |
| | | | | | | | | | KPLVEEPQNL | | | | |
| | | | | | | | | | IK (SEQ ID | | | | |
| | | | | | | | | | NO: 2628)(13)- | | | | |
| | | | | | | | | | ISKDNAK | | | | |
| | | | | | | | | | (SEQ ID NO: | | | | |
| | | | | | | | | | 2625)(3) | | | | |
| | | | | | | | | | CCAAADPHE | H26(81) | HSA(396) | | |
| | | | | | | | | | CYAKVFDEF | | | | |
| | | | | | | | | | KPLVEEPQNL | | | | |
| | | | | | | | | | IK (SEQ ID | | | | |
| | | | | | | | | | NO: 2628)(13)- | | | | |
| | | | | | | | | | DNAKNTVLL | | | | |
| | | | | | | | | | QMNSLKPED | | | | |
| | | | | | | | | | TAVYYCAAR | | | | |
| | | | | | | | | | (SEQ ID NO: | | | | |
| | | | | | | | | | 2626)(4) | | | | |
| | | | | | | | | | EFVASISWTY | H26(80) | HSA(499) | | |
| | | | | | | | | | GYTNYANSV | | | | |
| | | | | | | | | | KGR (SEQ ID | | | | |
| | | | | | | | | | NO: 2629)(20)- | | | | |
| | | | | | | | | | VTKCCTESL | | | | |
| | | | | | | | | | VNR (SEQ ID | | | | |
| | | | | | | | | | NO: 2615)(3) | | | | |
| | | | | | | | | | RGEDPEYDY | H26(120) | HSA(565) | | |
| | | | | | | | | | WGQGTQVT | | | | |
| | | | | | | | | | VSSEPK (SEQ | | | | |
| | | | | | | | | | ID NO: | | | | |
| | | | | | | | | | 2630)(6)- | | | | |
| | | | | | | | | | ATKEQLK | | | | |
| | | | | | | | | | (SEQ ID NO: | | | | |
| | | | | | | | | | 2599)(3) | | | | |
| | | | | | | | | | RGEDPEYDY | H26(122) | HSA(565) | | |
| | | | | | | | | | WGQGTQVT | | | | |
| | | | | | | | | | VSSEPK (SEQ | | | | |
| | | | | | | | | | ID NO: | | | | |
| | | | | | | | | | 2630)(8)- | | | | |
| | | | | | | | | | ATKEQLK | | | | |
| | | | | | | | | | (SEQ ID NO: | | | | |
| | | | | | | | | | 2599)(3) | | | | |
| | | | | | | | | | DPNSAQVQL | H26(13) | HSA(565) | | |
| | | | | | | | | | VESGGGLVQ | | | | |
| | | | | | | | | | AGGSLR (SEQ | | | | |
| | | | | | | | | | ID NO: | | | | |
| | | | | | | | | | 2631)(1)- | | | | |
| | | | | | | | | | ATKEQLK | | | | |
| | | | | | | | | | (SEQ ID NO: | | | | |
| | | | | | | | | | 2599)(3) | | | | |
| | | | | | | | | H27 | EFVAAITQNG | H27(82) | HSA(28) | Seq_ | E3 |
| | | | | | | | | | GTTYYADSV | | | 10156 | |
| | | | | | | | | | KGR (SEQ ID | | | | |
| | | | | | | | | | NO: 2632)(20)- | | | | |
| | | | | | | | | | DAHKSEVAH | | | | |
| | | | | | | | | | R (SEQ ID NO: | | | | |
| | | | | | | | | | 2633)(4) | | | | |
| | | | | | | | | | EFVAAITQNG | H27(82) | HSA(305) | | |
| | | | | | | | | | GTTYYADSV | | | | |
| | | | | | | | | | KGR (SEQ ID | | | | |
| | | | | | | | | | NO: 2632)(20)- | | | | |
| | | | | | | | | | ECCEKPLLEK | | | | |
| | | | | | | | | | (SEQ ID NO: | | | | |
| | | | | | | | | | 2634)(5) | | | | |
| | | | | | | | | | EFVAAITQNG | H27(82) | HSA(36) | | |
| | | | | | | | | | GTTYYADSV | | | | |
| | | | | | | | | | KGR (SEQ ID | | | | |
| | | | | | | | | | NO: 2632)(20)- | | | | |
| | | | | | | | | | FKDLGEENF | | | | |
| | | | | | | | | | K (SEQ ID NO: | | | | |
| | | | | | | | | | 2635)(2) | | | | |
| | | | | | | | | | FKDLGEENF | H27(60) | HSA(36 [symbol] | | |
| | | | | | | | | | K (SEQ ID NO: | | | | |
| | | | | | | | | | 2635)(2)- | | | | |
| | | | | | | | | | EAPGKGR | | | | |
| | | | | | | | | | (SEQ ID NO: | | | | |
| | | | | | | | | | 2636)(5) | | | | |
| | | | | | | | | H28 | NTVYLEMNN | N28(103) | HSA(565) | Seq_ | E2 |
| | | | | | | | | | LKPEDTAVY | | | 14266 | |
| | | | | | | | | | SCGAGVSDY | | | | |
| | | | | | | | | | GCYR (SEQ | | | | |
| | | | | | | | | | ID NO: | | | | |
| | | | | | | | | | 2637)(11)- | | | | |
| | | | | | | | | | ATKEQLK | | | | |
| | | | | | | | | | (SEQ ID NO: | | | | |
| | | | | | | | | | 2599)(3) | | | | |
| | | | | | | | | | TSGYNYWGQ | N28(143) | HSA(375) | | |
| | | | | | | | | | GTQ VTVS SEP | | | | |
| | | | | | | | | | KTPK (SEQ ID | | | | |
| | | | | | | | | | NO: 2638)(20)- | | | | |
| | | | | | | | | | LAKTYETTLE | | | | |
| | | | | | | | | | K (SEQ ID NO: | | | | |
| | | | | | | | | | 2594)(3) | | | | |
| | | | | | | | | H29 | / | / | / | / | / |
| | | | | | | | | H30 | / | / | / | / | / |
| | | | | | | | | H31 | / | / | / | / | / |
| | | | | | | | | H32 | / | / | / | / | / |
| | | | | | | | | H33 | LAKTYETTLE | H33(82) | HSA(375) | Seq_ | E2 |
| | | | | | | | | | K (SEQ ID NO: | | | 28093 | |
| | | | | | | | | | 2594)(3)- | | | | |
| | | | | | | | | | DSVKGR | | | | |
| | | | | | | | | | (SEQ ID NO: | | | | |
| | | | | | | | | | 2639)(4) | | | | |
| | | | | | | | | | CCAAADPHE | H33(93) | HSA(396) | | |
| | | | | | | | | | CYAKVFDEF | | | | |
| | | | | | | | | | KPLVEEPQNL | | | | |
| | | | | | | | | | IK (SEQ ID | | | | |
| | | | | | | | | | NO: 2628)(13)- | | | | |
| | | | | | | | | | DNAKNTVYL | | | | |
| | | | | | | | | | QMNSLK | | | | |
| | | | | | | | | | (SEQ ID NO: | | | | |
| | | | | | | | | | 2640)(4) | | | | |
| | | | | | | | | | DNAKNTVYL | H33(93) | HSA(375) | | |
| | | | | | | | | | QMNSLK | | | | |
| | | | | | | | | | (SEQ ID NO: | | | | |
| | | | | | | | | | 2640)(4)- | | | | |
| | | | | | | | | | LAKTYETTLE | | | | |
| | | | | | | | | | K (SEQ ID NO: | | | | |
| | | | | | | | | | 2594)(3) | | | | |
| | | | | | | | | H34 | PLVEEPQNLI | H34(82) | HSA(413) | Seq_ | E2 |
| | | | | | | | | | KQNCELFEQ | | | 9366 | |
| | | | | | | | | | LGEYK(11)- | | | | |
| | | | | | | | | | DSVKGR | | | | |
| | | | | | | | | | (SEQ ID NO: | | | | |
| | | | | | | | | | 2639)(4) | | | | |
| | | | | | | | | | CCAAADPHE | H34(93) | HSA(396) | | |
| | | | | | | | | | CYAKVFDEF | | | | |
| | | | | | | | | | KPLVEEPQNL | | | | |
| | | | | | | | | | IK (SEQ ID | | | | |
| | | | | | | | | | NO: 2628)(13)- | | | | |
| | | | | | | | | | DNAKNTVYL | | | | |
| | | | | | | | | | QMNSLK | | | | |
| | | | | | | | | | (SEQ ID NO: | | | | |
| | | | | | | | | | 2640)(4) | | | | |
| | | | | | | | | | VFDEFKPLVE | H34(72) | HAS(402) | | |
| | | | | | | | | | EPQNLIK | | | | |
| | | | | | | | | | (SEQ ID NO: | | | | |
| | | | | | | | | | 2598)(6)- | | | | |
| | | | | | | | | | HDYNTYYR | | | | |
| | | | | | | | | | (SEQ ID NO: | | | | |
| | | | | | | | | | 2641)(2) | | | | |
| | | | | | | | | H35 | / | / | / | / | / |
| | | | | | | | | H36 | / | / | / | / | / |
| | | | | | | | | H37 | / | / | / | / | / |
| | | | | | | | | H38 | / | / | / | / | / |
| | | | | | | | | H39 | SHCIAEVEND | H39(2) | HSA(325) | Seq_ | E2 |
| | | | | | | | | | EMPADLPSL | | | 43495 | |
| | | | | | | | | | AADFVESK | | | | |
| | | | | | | | | | (SEQ ID NO: | | | | |
| | | | | | | | | | 2642)(15)- | | | | |
| | | | | | | | | | ASMTGGQQ | | | | |
| | | | | | | | | | MGR (SEQ ID | | | | |
| | | | | | | | | | NO: 2546)(1) | | | | |
| | | | | | | | | | RPCFSALEVD | H39(2) | HSA(516) | | |
| | | | | | | | | | ETYVPK (SEQ | | | | |
| | | | | | | | | | ID NO: | | | | |
| | | | | | | | | | 2616)(8)- | | | | |
| | | | | | | | | | ASMTGGQQ | | | | |
| | | | | | | | | | MGR (SEQ ID | | | | |
| | | | | | | | | | NO: 2546)(1) | | | | |
| | | | | | | | | | SHCIAEVEND | H39(2) | HSA(332) | | |
| | | | | | | | | | EMPADLPSL | | | | |
| | | | | | | | | | AADFVESK | | | | |
| | | | | | | | | | (SEQ ID NO: | | | | |
| | | | | | | | | | 2642)(22)- | | | | |
| | | | | | | | | | ASMTGGQQ | | | | |
| | | | | | | | | | MGR (SEQ ID | | | | |
| | | | | | | | | | NO: 2546)(1) | | | | |
| | | | | | | | | | SHCIAEVEND | H39(2) | HSA(321) | | |
| | | | | | | | | | EMPADLPSL | | | | |
| | | | | | | | | | AADFVESK | | | | |
| | | | | | | | | | (SEQ ID NO: | | | | |
| | | | | | | | | | 2642)(11)- | | | | |
| | | | | | | | | | ASMTGGQQ | | | | |
| | | | | | | | | | MGR (SEQ ID | | | | |
| | | | | | | | | | NO: 2546)(1) | | | | |
| | | | | | | | | H40 | LAKTYETTLE | H40(82) | HSA(375) | Seq_ | E2 |
| | | | | | | | | | K (SEQ ID NO: | | | 45710 | |
| | | | | | | | | | 2594)(3)- | | | | |
| | | | | | | | | | STHYADSVK | | | | |
| | | | | | | | | | GR (SEQ ID | | | | |
| | | | | | | | | | NO: 2643)(9) | | | | |
| | | | | | | | | H41 | / | / | / | / | / |
| | | | | | | | | H42 | KTVYLQMNS | H42(94) | HSA(468) | Seq_ | E2 |
| | | | | | | | | | LKPEDTAVY | | | 44732 | |
| | | | | | | | | | YCAADYR | | | | |
| | | | | | | | | | (SEQ ID NO: | | | | |
| | | | | | | | | | 2644)(1)- | | | | |
| | | | | | | | | | HPEAKR | | | | |
| | | | | | | | | H43 | / | / | / | / | / |
| | | | | | | | | H44 | / | / | / | / | / |

[symbol]

indicates data missing or illegible when filed

TABLE 3
Summary of PDZ Nbs and their biophysical and physiochemical properties.

| | | | | | Bind by | WT | Mutant | |
|---|---|---|---|---|---|---|---|---|
| | | | | | beads- | ELISA | ELISA | |
| | | | | | binding | affinity | affinity | Affinity |
| | | | SEQ ID | | assay | (LogIC50 | (LogIC50 | fold |
| ID | Enzyme | Protein Sequences | NO | Soluble | (FIG. 10b) | (oD450nm)) | (oD450nm)) | change |
| P1 | Trypsin/ | MASMTG | SEQ ID | Yes | Yes | / | / | / |
| | Chymo | GQQMGR | NO: 143 | | | | | |
| | | NSADVQL | | | | | | |
| | | VESGGGL | | | | | | |
| | | VQPGGSL | | | | | | |
| | | RLSCAAS | | | | | | |
| | | GFTLDDY | | | | | | |
| | | AIGWFRQ | | | | | | |
| | | APGKERE | | | | | | |
| | | GVSCISSH | | | | | | |
| | | GSTYYAD | | | | | | |
| | | SVKGRFTI | | | | | | |
| | | SRDNVKN | | | | | | |
| | | TLYLQMN | | | | | | |
| | | SLKPEDT | | | | | | |
| | | ALYYCAA | | | | | | |
| | | SYYSDYE | | | | | | |
| | | VAVCRSD | | | | | | |
| | | ALDAWG | | | | | | |
| | | GQTQVTV | | | | | | |
| | | SEPKTPK | | | | | | |
| | | GGCGGGL | | | | | | |
| | | EHHHHHH | | | | | | |
| P2 | Trypsin/ | MASMTG | SEQ ID | Yes | Yes | 5.437 | 4.354 | 12.106 |
| | Chymo | GQQMGR | NO: 144 | | | | | |
| | | NSADVQL | | | | | | |
| | | VESGGGL | | | | | | |
| | | VQAGGSL | | | | | | |
| | | RLSCAAS | | | | | | |
| | | GHTFSSY | | | | | | |
| | | TMGWFH | | | | | | |
| | | QAPGKER | | | | | | |
| | | EFVAEISG | | | | | | |
| | | TGGNTGY | | | | | | |
| | | ASDVKGR | | | | | | |
| | | FTISRDNA | | | | | | |
| | | KNTVYLQ | | | | | | |
| | | MNSLKPE | | | | | | |
| | | DTAVYYC | | | | | | |
| | | AAVIGSPT | | | | | | |
| | | DSSDYRS | | | | | | |
| | | SLDYDYW | | | | | | |
| | | GQGTQVT | | | | | | |
| | | VSEPKTP | | | | | | |
| | | KGGCGGG | | | | | | |
| | | LEHHHHH | | | | | | |
| | | H | | | | | | |
| P3 | Trypsin/ | MASMTG | SEQ ID | Yes | Yes | 5.264 | 4.781 | 3.04089 |
| | Chymo | GQQMGR | NO: 145 | | | | | |
| | | NSADVQL | | | | | | |
| | | VESGGGL | | | | | | |
| | | VQAGGSL | | | | | | |
| | | RLSCAAS | | | | | | |
| | | GRTFSSYT | | | | | | |
| | | MGWFHQ | | | | | | |
| | | APGKERE | | | | | | |
| | | FVAEIGGT | | | | | | |
| | | GGNTGYA | | | | | | |
| | | DSVKGRF | | | | | | |
| | | TISRDNA | | | | | | |
| | | KNTVYLQ | | | | | | |
| | | MNSLKPE | | | | | | |
| | | DTAVYYC | | | | | | |
| | | AAVIGSPT | | | | | | |
| | | DSSDYRS | | | | | | |
| | | SLDYDYW | | | | | | |
| | | GQGTQVT | | | | | | |
| | | VSEPKTP | | | | | | |
| | | KGGCGGG | | | | | | |
| | | LEHHHHH | | | | | | |
| | | H | | | | | | |
| P4 | Trypsin/ | MASMTGG | SEQ ID | Yes | Yes | 4.425 | 4.578 | 1 |
| | Chymo | QQMGRNS | NO: 146 | | | | | |
| | | AHVQLVE | | | | | | |
| | | SGGGLVQ | | | | | | |
| | | AGGSLRL | | | | | | |
| | | SCAAAGR | | | | | | |
| | | TSSDYAM | | | | | | |
| | | GWFRQAP | | | | | | |
| | | GKEREFV | | | | | | |
| | | SAINWSGI | | | | | | |
| | | STYYADS | | | | | | |
| | | VKGRFTIS | | | | | | |
| | | RDNAKNT | | | | | | |
| | | VHLQMNS | | | | | | |
| | | LKPEDTA | | | | | | |
| | | VYYCAAE | | | | | | |
| | | KLESLRN | | | | | | |
| | | WHDPLM | | | | | | |
| | | YDYWGQ | | | | | | |
| | | GTQVTVS | | | | | | |
| | | EPKTPKG | | | | | | |
| | | GCGGGLE | | | | | | |
| | | HHHHHH | | | | | | |
| P5 | Trypsin/ | MASMTGG | SEQ ID | Yes | Yes | 4.704 | 0 | 50582.5 |
| | Chymo | QQMGRNS | NO: 147 | | | | | |
| | | ADVQLVES | | | | | | |
| | | GGGLVQA | | | | | | |
| | | GSSLRLSC | | | | | | |
| | | AASGITFR | | | | | | |
| | | WYTMAWF | | | | | | |
| | | RQAPGKER | | | | | | |
| | | DFVATINW | | | | | | |
| | | SGSDTNYA | | | | | | |
| | | DSVKGRFTI | | | | | | |
| | | SRDNAKNT | | | | | | |
| | | VTLQMNSL | | | | | | |
| | | QPEDTAVY | | | | | | |
| | | YCAGVPGT | | | | | | |
| | | SLSGETDPR | | | | | | |
| | | DYDYWGQ | | | | | | |
| | | GTQVTVSE | | | | | | |
| | | PKTPKGGC | | | | | | |
| | | GGGLEHHH | | | | | | |
| | | HHH | | | | | | |
| P6 | Trypsin/ | MASMTG | SEQ ID | Yes | Yes | 5.247 | 4.726 | 3.31895 |
| | Chymo | GQQMGR | NO: 148 | | | | | |
| | | NSAHVQL | | | | | | |
| | | VESGGGL | | | | | | |
| | | VQAGGSL | | | | | | |
| | | RLSCAAS | | | | | | |
| | | GRTFSRY | | | | | | |
| | | RMGWFH | | | | | | |
| | | QAPGKER | | | | | | |
| | | EFVAEISG | | | | | | |
| | | TGGNTGY | | | | | | |
| | | ADSVKGR | | | | | | |
| | | FTMSRDN | | | | | | |
| | | AKNTVYL | | | | | | |
| | | QMNSLKP | | | | | | |
| | | EDTGVYY | | | | | | |
| | | CAAVIGSP | | | | | | |
| | | TDSSDYR | | | | | | |
| | | SSLDYDY | | | | | | |
| | | WGQGTQ | | | | | | |
| | | VTVSEPK | | | | | | |
| | | TKPGGCG | | | | | | |
| | | GGLEHHH | | | | | | |
| | | HHH | | | | | | |
| P7 | Trypsin | MASMTG | SEQ ID | No | / | / | / | / |
| | | GQQMGR | NO: 149 | | | | | |
| | | NSADVQL | | | | | | |
| | | VESGGGL | | | | | | |
| | | VKPGESL | | | | | | |
| | | KLSCVAS | | | | | | |
| | | GETLSSYI | | | | | | |
| | | MGWFRQ | | | | | | |
| | | APGKERE | | | | | | |
| | | FVAAVSW | | | | | | |
| | | SGNQQDY | | | | | | |
| | | ADSVKGR | | | | | | |
| | | FTISRDNA | | | | | | |
| | | KNTVYLQ | | | | | | |
| | | MNSLKPE | | | | | | |
| | | DTAVYYC | | | | | | |
| | | ANGPCTG | | | | | | |
| | | PRAIAEVL | | | | | | |
| | | YESWGQG | | | | | | |
| | | TQVTVSE | | | | | | |
| | | PKTPKGG | | | | | | |
| | | CGGGLEH | | | | | | |
| | | HHHHH | | | | | | |
| P8 | Trypsin | MASMTG | SEQ ID | No | / | / | / | / |
| | | GQQMGR | NO: 150 | | | | | |
| | | NSAEVQL | | | | | | |
| | | VESGGGL | | | | | | |
| | | VQPGGSL | | | | | | |
| | | RLSDKAS | | | | | | |
| | | GFDFEYY | | | | | | |
| | | TIGWFRQ | | | | | | |
| | | APGKERE | | | | | | |
| | | GVSCINR | | | | | | |
| | | GDGATYY | | | | | | |
| | | RDSVKGR | | | | | | |
| | | FTISRDNA | | | | | | |
| | | KKTMYLE | | | | | | |
| | | MNNLKPE | | | | | | |
| | | DTAVYYC | | | | | | |
| | | ATADSGW | | | | | | |
| | | GCYGHRI | | | | | | |
| | | QKNEFDH | | | | | | |
| | | FGQGTQV | | | | | | |
| | | TVSEPKTP | | | | | | |
| | | KGGCGGG | | | | | | |
| | | LEHHHHH | | | | | | |
| | | H | | | | | | |
| P9 | Chymo | MASMTG | SEQ ID | Yes | / | 4.878 | 2.61 | 185.353 |
| | | GQQMGR | NO: 151 | | | | | |
| | | NSADVQL | | | | | | |
| | | VESGGGL | | | | | | |
| | | VQAGGSL | | | | | | |
| | | RLSCVAS | | | | | | |
| | | VASGRTF | | | | | | |
| | | GWYDMG | | | | | | |
| | | WFRQAPG | | | | | | |
| | | KEREFVA | | | | | | |
| | | AISWSGG | | | | | | |
| | | STYYADS | | | | | | |
| | | VKGRSTIS | | | | | | |
| | | RDNAKNT | | | | | | |
| | | VYLQMNS | | | | | | |
| | | LKPEDTA | | | | | | |
| | | VYYCAAR | | | | | | |
| | | GGGTSVD | | | | | | |
| | | SDYDVGE | | | | | | |
| | | FEYDYWG | | | | | | |
| | | QGTQVTV | | | | | | |
| | | SEPKTPK | | | | | | |
| | | GGCGGGL | | | | | | |
| | | EHHHHHH | | | | | | |
| P10 | Chymo | MASMTG | SEQ ID | Yes | / | 5.205 | 3.834 | 23.4963 |
| | | GQQMGR | NO: 152 | | | | | |
| | | NSADVQL | | | | | | |
| | | VESGGGL | | | | | | |
| | | VQAGGSL | | | | | | |
| | | RLSCTAS | | | | | | |
| | | GRTFSTY | | | | | | |
| | | TMAWFR | | | | | | |
| | | QAPGKER | | | | | | |
| | | EFVAAIT | | | | | | |
| | | WSGTYYA | | | | | | |
| | | DSVKGRF | | | | | | |
| | | TISRDNA | | | | | | |
| | | KNTMYLQ | | | | | | |
| | | MNSLKPE | | | | | | |
| | | DTAVYIC | | | | | | |
| | | AAVIGST | | | | | | |
| | | VDSYSPS | | | | | | |
| | | DPLEYDY | | | | | | |
| | | WGQGTQ | | | | | | |
| | | VTVSEPK | | | | | | |
| | | TPKGGCG | | | | | | |
| | | GGLEHHH | | | | | | |
| | | HHH | | | | | | |
| P11 | Trypsin/ | MASMTGG | SEQ ID | Yes | / | 4.068 | 0 | 11695 |
| | Chymo | QQMGRNS | NO: 153 | | | | | |
| | | ADVQLVE | | | | | | |
| | | SGGGLVQ | | | | | | |
| | | AGGSLRLS | | | | | | |
| | | CVASGRT | | | | | | |
| | | FSTYTMG | | | | | | |
| | | WFRQAPG | | | | | | |
| | | KEREFVA | | | | | | |
| | | HIGWSGSS | | | | | | |
| | | TYYADSV | | | | | | |
| | | KGRFTISR | | | | | | |
| | | DNAKNTM | | | | | | |
| | | YLQMNSL | | | | | | |
| | | KPEDTAV | | | | | | |
| | | YYCAVAI | | | | | | |
| | | GSPVDSY | | | | | | |
| | | RHSDPLEY | | | | | | |
| | | DYWGQGT | | | | | | |
| | | QVTVSEP | | | | | | |
| | | KTPKGGC | | | | | | |
| | | GGGLEHH | | | | | | |
| | | HHHH | | | | | | |
| P12 | Chymo | MASMTG | SEQ ID | Yes | Yes | / | / | / |
| | | GQQMGR | NO: 154 | | | | | |
| | | NSAQVQL | | | | | | |
| | | VESGGGL | | | | | | |
| | | VQAGGSL | | | | | | |
| | | RLSCTAS | | | | | | |
| | | GRTFSTY | | | | | | |
| | | TMAWFR | | | | | | |
| | | QAPGKER | | | | | | |
| | | EFVAAIS | | | | | | |
| | | WSGAYY | | | | | | |
| | | AESVKGR | | | | | | |
| | | FTISRDNA | | | | | | |
| | | KNTVYLQ | | | | | | |
| | | MNSLKPE | | | | | | |
| | | DTAVYYC | | | | | | |
| | | AAVIGST | | | | | | |
| | | VDSYSPS | | | | | | |
| | | DPLEYDY | | | | | | |
| | | WARGPRS | | | | | | |
| | | PSEPKTPK | | | | | | |
| | | GGCGGGL | | | | | | |
| | | EHHHHHH | | | | | | |
| P13 | Chymo | MASMTG | SEQ ID | Yes | / | 4.454 | 0.0071 | 27982.3 |
| | | GQQMGR | NO: 155 | | | | | |
| | | NSAQVQL | | | | | | |
| | | VESGGGL | | | | | | |
| | | VQAGGSL | | | | | | |
| | | RLSCAAS | | | | | | |
| | | GRTFSTY | | | | | | |
| | | TMGWFR | | | | | | |
| | | QAPGKER | | | | | | |
| | | EFVAAVT | | | | | | |
| | | WSETLYS | | | | | | |
| | | DSVKGRF | | | | | | |
| | | TISRDNA | | | | | | |
| | | KNTVYLQ | | | | | | |
| | | MNSLKPE | | | | | | |
| | | DTAVYYC | | | | | | |
| | | AAVQGSP | | | | | | |
| | | VDTIVVL | | | | | | |
| | | TTSEEYD | | | | | | |
| | | YWGQGT | | | | | | |
| | | QVTVSSE | | | | | | |
| | | PKTPKGG | | | | | | |
| | | CGGGLEH | | | | | | |
| | | HHHHH | | | | | | |
| P14 | Chymo | MASMTG | SEQ ID | Yes | / | 5.151 | 3.741 | 25.704 |
| | | GQQMGR | NO: 156 | | | | | |
| | | NSAQVQL | | | | | | |
| | | VESGGGL | | | | | | |
| | | VQAGDSL | | | | | | |
| | | RLSCTAS | | | | | | |
| | | GRTFSTY | | | | | | |
| | | TMAWFR | | | | | | |
| | | QAPGKER | | | | | | |
| | | EFVAAIS | | | | | | |
| | | WSGTYYA | | | | | | |
| | | DSVKGRF | | | | | | |
| | | TISRDNA | | | | | | |
| | | KNTVYLQ | | | | | | |
| | | MNSLKPE | | | | | | |
| | | DTAVYYC | | | | | | |
| | | AAVIGST | | | | | | |
| | | VDTYSPS | | | | | | |
| | | DPLEYDA | | | | | | |
| | | WGQGTQ | | | | | | |
| | | VTVSSEP | | | | | | |
| | | KTPKGGS | | | | | | |
| | | GGGLEHH | | | | | | |
| | | HHHH | | | | | | |
| P15 | Chymo | MASMTG | SEQ ID | Yes | Yes | 4.971 | 1.657 | 2060.63 |
| | | GQQMGR | NO: 157 | | | | | |
| | | NSAQVQL | | | | | | |
| | | VESGGGL | | | | | | |
| | | VQAGGSL | | | | | | |
| | | RLSCVAS | | | | | | |
| | | GRPFSSLD | | | | | | |
| | | MGWFRQ | | | | | | |
| | | RPGKERD | | | | | | |
| | | VVATINW | | | | | | |
| | | TGDSTYY | | | | | | |
| | | LDSVKGR | | | | | | |
| | | FTISRDNA | | | | | | |
| | | KNTVFLQ | | | | | | |
| | | MNSLKPE | | | | | | |
| | | DTAVYYC | | | | | | |
| | | AARGGGS | | | | | | |
| | | SVDSEYD | | | | | | |
| | | VGEFEYD | | | | | | |
| | | YWGQGT | | | | | | |
| | | QVTVSSE | | | | | | |
| | | PKTPKGG | | | | | | |
| | | CGGGLEH | | | | | | |
| | | HHHHH | | | | | | |

TABLE 4
GST summary: amino acid sequence filters
derived from a deep learning approach

| Region | | Activity in | Activity in |
|---|---|---|---|
| of | | Low affinity | High affinity |
| activity | Filter | prediction | prediction |
| Cdr3 | See FIG. 15A, | <1% | 56% (41% |
| | SEQ ID NO: | | in 5-best |
| | 2663 | | contributors) |
| Cdr3 | See FIG. 15B, | 76% (69% | <1% |
| | SEQ ID NO: | in 5-best | |
| | 2664 | contributors) | |

TABLE 5
HSA summary: amino acid sequence filters
derived from a deep learning approach

| Region | | Activity in | Activity in |
|---|---|---|---|
| of | | Low affinity | High affinity |
| activity | Filter | prediction | prediction |
| Cdr3 | See FIG. 16A, | 79% (65%% | 20% (<10% |
| | SEQ ID NO: | in 5-best | in 5-best |
| | 2665 | contributors) | contributors) |
| Cdr3 | See FIG. 16B; | <1% | 75%( 50% |
| | SEQ ID NO: | | in 5-best |
| | 2666 | | contributors) |
| | | | Most contributing |
| Cdr3 | See FIG. 16C; | <1% | 77% (27% |
| | SEQ ID NO: | | in 5-best |
| | 2667 | | contributors) |
| | | | Most activated |

### REFERENCES

[0215] 1. Muyldermans, S. Nanobodies: natural single-domain antibodies. Annu Rev Biochem 82, 775-797 (2013).
[0216] 2. Beghein, E. & Gettemans, J. Nanobody Technology: A Versatile Toolkit for Microscopic Imaging, Protein-Protein Interaction Analysis, and Protein Function Exploration. Front Immunol 8, 771 (2017).
[0217] 3. Rasmussen, S. G. et al. Structure of a nanobody-stabilized active state of the beta(2) adrenoceptor. Nature 469, 175-180 (2011).
[0218] 4. Jovcevska, I. & Muyldermans, S. The Therapeutic Potential of Nanobodies. BioDrugs 34, 11-26 (2020).
[0219] 5. Lauwereys, M. et al. Potent enzyme inhibitors derived from dromedary heavy-chain antibodies. The EMBO journal 17, 3512-3520 (1998).
[0220] 6. Pardon, E. et al. A general protocol for the generation of Nanobodies for structural biology. Nature protocols 9, 674-693 (2014).
[0221] 7. McMahon, C. et al. Yeast surface display platform for rapid discovery of conformationally selective nanobodies. Nature structural & molecular biology 25, 289-296 (2018).
[0222] 8. Egloff, P. et al. Engineered peptide barcodes for in-depth analyses of binding protein libraries. Nature methods 16, 421-428 (2019).
[0223] 9. Fridy, P. C. et al. A robust pipeline for rapid production of versatile nanobody repertoires. Nature methods 11, 1253-1260 (2014).
[0224] 10. Savitski, M. M., Wilhelm, M., Hahne, H., Kuster, B. & Bantscheff, M. A Scalable Approach for Protein False Discovery Rate Estimation in Large Proteomic Data Sets. Molecular & cellular proteomics: MCP 14, 2394-2404 (2015).
[0225] 11. DeKosky, B. J. et al. High-throughput sequencing of the paired human immunoglobulin heavy and light chain repertoire. Nature biotechnology 31, 166-169 (2013).
[0226] 12. Elias, J. E. & Gygi, S. P. Target-decoy search strategy for increased confidence in large-scale protein identifications by mass spectrometry. Nature methods 4, 207-214 (2007).
[0227] 13. Schneidman-Duhovny, D., Inbar, Y., Nussinov, R. & Wolfson, HJ. PatchDock and SymmDock: servers for rigid and symmetric docking. Nucleic acids research 33, W363-W367 (2005).
[0228] 14. Chait, B. T., Cadene, M., Olinares, P. D., Rout, M. P. & Shi, Y. Revealing Higher Order Protein Structure Using Mass Spectrometry. Journal of the American Society for Mass Spectrometry 27, 952-965 (2016).
[0229] 15. Rout, M. P. & Sali, A. Principles for Integrative Structural Biology Studies. Cell 177, 1384-1403 (2019).
[0230] 16. Yu, C. & Huang, L. Cross-Linking Mass Spectrometry: An Emerging Technology for Interactomics and Structural Biology. Analytical Chemistry 90, 144-165 (2018).
[0231] 17. Leitner, A., Faini, M., Stengel, F. & Aebersold, R. Crosslinking and Mass Spectrometry: An Integrated Technology to Understand the Structure and Function of Molecular Machines. Trends in biochemical sciences 41, 20-32 (2016).
[0232] 18. Larsen, M. T., Kuhlmann, M., Hvam, M. L. & Howard, K. A. Albumin-based drug delivery: harnessing nature to cure disease. Mol Cell Ther 4, 3 (2016).
[0233] 19. Zhu, W. H., Smith, J. W. & Huang, C. M. Mass Spectrometry-Based Label-Free Quantitative Proteomics. J Biomed Biotechnol (2010).
[0234] 20. Cox, J. & Mann, M. MaxQuant enables high peptide identification rates, individualized p.p.b.-range mass accuracies and proteome-wide protein quantification. Nature biotechnology 26, 1367-1372 (2008).
[0235] 21. Shi, Y. et al. Structural characterization by cross-linking reveals the detailed architecture of a coatomer-related heptameric module from the nuclear pore complex. Molecular & cellular proteomics: MCP 13, 2927-2943 (2014).
[0236] 22. Kim, S. J. et al. Integrative structure and functional anatomy of a nuclear pore complex. Nature 555, 475-482 (2018).
[0237] 23. Pires, D. E. V., Ascher, D. B. & Blundell, T. L. mCSM: predicting the effects of mutations in proteins using graph-based signatures. Bioinformatics (Oxford, England) 30, 335-342 (2014).
[0238] 24. Finn, J. A. et al. Improving Loop Modeling of the Antibody Complementarity-Determining Region 3 Using Knowledge-Based Restraints. PloS one 11, e0154811 (2016).
[0239] 25. Tiller, K. E. et al. Arginine mutations in antibody complementarity-determining regions display context-dependent affinity/specificity trade-offs. The Journal of biological chemistry 292, 16638-16652 (2017).
[0240] 26. Mitchell, L. S. & Colwell, L. J. Analysis of nanobody paratopes reveals greater diversity than classical antibodies. Protein Eng Des Sel 31, 267-275 (2018).
[0241] 27. Desmyter, A. et al. Crystal structure of a camel single-domain VH antibody fragment in complex with lysozyme. Nat Struct Biol 3, 803-811 (1996).
[0242] 28. Li, T. et al. Immuno-targeting the multifunctional CD38 using nanobody. Scientific reports 6 (2016).
[0243] 29. Sheng, M. & Sala, C. PDZ domains and the organization of supramolecular complexes. Annu Rev Neurosci 24, 1-29 (2001).
[0244] 30. Doyle, D. A. et al. Crystal structures of a complexed and peptide-free membrane protein-binding domain: Molecular basis of peptide recognition by PDZ. Cell 85, 1067-1076 (1996).
[0245] 31. Niethammer, M. et al. CRIPT, a novel postsynaptic protein that binds to the third PDZ domain of PSD-95/SAP90. Neuron 20,693-707 (1998).
[0246] 32. Akram, A. & Inman, R. D. Immunodominance: A pivotal principle in host response to viral infections. Clin Immunol 143, 99-115 (2012).
[0247] 33. Bar-On, Y. M., Phillips, R. & Milo, R. The biomass distribution on Earth. Proceedings of the National Academy of Sciences of the United States of America 115, 6506-6511 (2018).
[0248] 34. Chaplin, D. D. Overview of the immune response. J Allergy Clin Immun 125, S3-S23 (2010).
[0249] 35. Acharya, P. et al. Heavy chain-only IgG2b llama antibody effects near-pan HIV-1 neutralization by recognizing a CD4-induced epitope that includes elements of coreceptor- and CD4-binding sites. J Virol 87, 10173-10181 (2013).
[0250] 36. Arabi, Y. M. et al. Middle East Respiratory Syndrome. New EngI J Med 376,584-594 (2017).
[0251] 37. Flajnik, M. F., Deschacht, N. & Muyldermans, S. A Case Of Convergence: Why Did a Simple Alternative to Canonical Antibodies Arise in Sharks and Camels? PLoS biology 9 (2011).
[0252] 38. Sircar, A., Sanni, K. A., Shi, J. & Gray, J. J. Analysis and modeling of the variable region of camelid single-domain antibodies. J Immunol 186, 6357-6367 (2011).
[0253] 39. Baran, D. et al. Principles for computational design of binding antibodies. Proceedings of the National Academy of Sciences of the United States of America 114, 10900-10905 (2017).
[0254] 40. Chevalier, A. et al. Massively parallel de novo protein design for targeted therapeutics. Nature 550, 74-79 (2017).
[0255] 41. Arbabi Ghahroudi, M., Desmyter, A., Wyns, L., Hamers, R. & Muyldermans, S. Selection and identification of single domain antibody fragments from camel heavy-chain antibodies. FEBS letters 414, 521-526 (1997).
[0256] 42. Shi, Y. et al. A strategy for dissecting the architectures of native macromolecular assemblies. Nature methods 12, 1135-1138 (2015).
[0257] 43. Chen, Z. L. et al. A high-speed search engine pLink 2 with systematic evaluation for proteome-scale identification of cross-linked peptides. Nature communications 10, 3404 (2019).
[0258] 44. Dunbar, J. & Deane, C. M. ANARCI: antigen receptor numbering and receptor classification. Bioinformatics (Oxford, England) 32, 298-300 (2016).
[0259] 45. Lefranc, M. P. et al. IMGT unique numbering for immunoglobulin and T cell receptor variable domains and Ig superfamily V-like domains. Dev Comp Immunol 27, 55-77 (2003).
[0260] 46. Crooks, G. E., Hon, G., Chandonia, J. M. & Brenner, S. E. WebLogo: a sequence logo generator. Genome research 14, 1188-1190 (2004).
[0261] 47. Sievers, F. & Higgins, D. G. Clustal Omega, accurate alignment of very large numbers of sequences. Methods in molecular biology 1079, 105-116 (2014).
[0262] 48. Letunic, I. & Bork, P. Interactive Tree Of Life (iTOL): an online tool for phylogenetic tree display and annotation. Bioinformatics (Oxford, England) 23, 127-128 (2007).
[0263] 49. Waterhouse, A. M., Procter, J. B., Martin, D. M., Clamp, M. & Barton, GJ. Jalview Version 2—a multiple sequence alignment editor and analysis workbench. Bioinformatics (Oxford, England) 25, 1189-1191 (2009).
[0264] 50. Kall, L., Canterbury, J. D., Weston, J., Noble, W. S. & MacCoss, M. J. Semi-supervised learning for peptide identification from shotgun proteomics datasets. Nature methods 4, 923-925 (2007).
[0265] 51. Webb, B. & Sali, A. Comparative Protein Structure Modeling Using MODELLER. Curr Protoc Bioinformatics 47, 5 6 1-32 (2014).
[0266] 52. Dong, G. Q., Fan, H., Schneidman-Duhovny, D., Webb, B. & Sali, A. Optimized atomic statistical potentials: assessment of protein interfaces and loops. Bioinformatics (Oxford, England) 29, 3158-3166 (2013).
[0267] 53. Schneidman-Duhovny, D. & Wolfson, H. J. Modeling of Multimolecular Complexes. Methods in molecular biology 2112, 163-174 (2020).
[0268] 54. Russel, D. et al. Putting the pieces together: integrative modeling platform software for structure determination of macromolecular assemblies. PLoS biology 10, e1001244 (2012).
[0269] 55. Fernandez-Martinez, J. et al. Structure and Function of the Nuclear Pore Complex Cytoplasmic mRNA Export Platform. Cell 167, 1215-1228 e1225 (2016).

The application's sequence listing, which the Patent Office published only in electronic form, follows.

SEQUENCE LISTING (2668 sequences)

SEQ ID NO: 1 - protein, 151 aa, Homo sapiens
MASMTGGQQMGRNSAQVQLVESGGGLVQAGGSLRLSCAAPGSTFSTNIIAWYRQPPGKQRELVAAIGGPGSTNYADSVKGRFTISRDNAKNTGYLQMKSLKPDDTAVYYCNMVTQRGNEYWGQGTQVTVSSEPKTPKGGCGGGLEHHHHHH

SEQ ID NO: 2 - protein, 155 aa, Homo sapiens
MASMTGGQQMGRNSAEVQLVESGGDLVQAGGSLRLSCSASGNIFKINDMGWYRQAPGKQRELVARISSSGNTNYADSVKGRFTISRDNGKNTVYLQMNRVKPEDTAVYYCNADVQVSRNYEYEYWGQGTQVTVSSEPKTPKGGCGGGLEHHHHHH

SEQ ID NO: 3 - protein, 159 aa, Homo sapiens
MASMTGGQQMGRNSAQVQLVESGGGLVQAGGSLRLSCAASAGTFSTYAISWFRQAPGKERDFVAAINRISRSAYSPYYADSVKGRFTISEDNAKNTVNLQMNSLKPEDTAVYYCAAGSIFHTDVRYYAYWARGPRSPSSEPKTPKGGCGGGLEHHHHHH

SEQ ID NO: 4 - protein, 164 aa, Homo sapiens
MASMTGGQQMGRNSAEVQLVESGGGLVQPGGSLRLSCSASGRTLDSYGIGWFRQAPGKEREEVSCISSSGGNADYADSVMGRFTISRDNAKNTVYLHMNNLRPEDTAVYYCAAIAGLCALHYTDYKVVVIPGSWGQGTQVTVSSEPKTPKGGCGGGLEHHHHHH

SEQ ID NO: 5 - protein, 162 aa, Homo sapiens
MASMTGGQQMGRNSAEVQLVESGGGVVQPGGSLTLSCAASGFAFRNYAMSWVRQAPGKGPEWVSQINGRGGYTSYADSVKGRFTISRDNTKNTLYLQMNNLKPDDTAVYYCAKDPTQLRWIPVPNYILGSTKGQGTQVTVSSEPKTPKGGCGGGLEHHHHHH

SEQ ID NO: 6 - protein, 153 aa, Homo sapiens
MASMTGGQQMGRNSAQVQLVESGGGLVQAGGSLRLSCAASGRTISSYAMGWFRQAPGKERELVARITSSAGSTYYADSVKGRFTISRDNAKNTMYLQMNSLKPEDTAVYYCAVEIVRAQYDYWGQGTQVTVSSEPKTPKGGCGGGLEHHHHHH

SEQ ID NO: 7 - protein, 157 aa, Homo sapiens
MASMTGGQQMGRNSAQVQLVESGGGLVQPGDSLRLSCAVSGQYVNMAAMGWFRQAPGKEREFVAGISWSDDTDIADSVKGRFTISRDHGKNTVDLQMNSLKPEDTGVYLCAGRFRRLAKDFGEYDYWGQGTQVTVSSEPKTPKGGCGGGLEHHHHHH

SEQ ID NO: 8 - protein, 155 aa, Homo sapiens
MASMTGGQQMGRNSAQVQLVESGGGLVQAGGSLRLSCAASGITSSIASMGWFRQAPGKEEEFVARIRWNTDNTYYADSVKGRFTISRDNAQNTVYLQMNRLKPEDTAVYYCVARRGWSDLLYDYRGQGTQVTVSSEPKTPKGGCGGGLEHHHHHH

SEQ ID NO: 9 - protein, 159 aa, Homo sapiens
MASMTGGQQMGRNSADVQLVESGGGLVQPGGSLRLSCAASGLTLDNYDMAWFRQAPGKEREFVTAINYVGGRTYADSVRGRFTISRDDTKNTVYLQMNSLKPEDTAVYYCAAGLQYGITSLRTRNYNYWGQGTQVTVSSEPKTPKGGCGGGLEHHHHHH

SEQ ID NO: 10 - protein, 157 aa, Homo sapiens
MASMTGGQQMGRNSAQVQLVESGGGLVQAGGSLRLSCAASGSIFSINSMGWYRQAPGIERELVAHMPTGGNTNYLDSVKGRFVISRDDDKKTVYLQMNSLTPEDTAVYYCHAVITTVGRTGVRTYSYWARGPRSPSSEPKTPKGGCGGGLEHHHHHH

SEQ ID NO: 11 - protein, 160 aa, Homo sapiens
MASMTGGQQMGRNSAQVQLVESGGGLVQAGGSLRLSCAASGRTFNSGILGWFRQAPGKDREFVAAIGWSAGSTYYSDSVKGRFTISRDITKNTVFLQMNSLKPEDTAVYYCADKKYYYGREASSNVYEYWGQGTQVTVSSEPKTPKGGCGGGLEHHHHHH

SEQ ID NO: 12 - protein, 155 aa, Homo sapiens
MASMTGGQQMGRNSAQVQLVESGGGLVQAGGSLRLSCAASRSTFRINAAGWYRQAPGKERELVARISSGGSTNYADSVKGRFTISRDNAKNTVYLQMNSLKPEDTAVYYCNVPYYREDGYEYDAWGQGTQVTVSSEPKTPKGGCGGGLEHHHHHH

SEQ ID NO: 13 - protein, 159 aa, Homo sapiens
MASMTGGQQMGRNSADVQLVESGGGVVQAGGSLRLSCAASGRTFSDYAMGWFRQAPGKEREFVAGVSWSGVDTYYADSVKGRFTISRDNAKNTLYVQMNSLKPEDTAVYYCAAQRYYHGHAKNMRYDYWGQGTQVTVSSEPKTPKGGCGGGLEHHHHHH

SEQ ID NO: 14 - protein, 155 aa, Homo sapiens
MASMTGGQQMGRNSAEVQLVESGGGLVQAGGSLRLSCAASGSTFDTNPIGWYRQAPGKQRDLVAMITSGGHTNYADSVKGRFTISRDNAKNTVYLQMNSLKPEDTAVYYCTVPHYREDGYEYHFWGQGTQVTVSSEPKTPKGGCGGGLEHHHHHH

SEQ ID NO: 15 - protein, 155 aa, Homo sapiens
MASMTGGQQMGRNSAQVQLVESGGGLVQAGGSLRLSCAASGSTFDTNPIGWYRQAPGKQRDLVAMITSGGHTNYADSVKGRFTISRDNAKNTVYLQMNSLKPEDTAVYYCTVPHYREDGYEYHCWGQGTQVTVSSEPKTPKGGCGGGLEHHHHHH

SEQ ID NO: 16 - protein, 160 aa, Homo sapiens
MASMTGGQQMGRNSAEVQLVESGGGLVQPGGSLRLSCAASGSTFSINAIGWYRQAPGKEREFVAALRWPGNIWYYADFVEGRITISRDNAKNTVYLQMNSLKPEDTAVYYCAARPENRGSYRDAATYDFWGQGTQVTVSSEPKTPKGGCGGGLEHHHHHH

SEQ ID NO: 17 - protein, 160 aa, Homo sapiens
MASMTGGQQMGRNSAEVQLVESGGGLVQAGGSLRLSCAASGVTISYWVMGWFRQAPGKEREFVARISWGGERTYYADSVKGRFAISRDNAKNTVYLQMNSLNAEDTAVYYCAADRTGWGHSNSRSEYDYWGQGTQVTVSSEPKTPKGGCGGGLEHHHHHH

SEQ ID NO: 18 - protein, 162 aa, Homo sapiens
MASMTGGQQMGRNSAQVQLVESGGGLVQAGASLRLTCGPSGRSVGLYTMGWFRQAPGKEREFVAGVTYLGDTTTYSDAVKGRFTISRENNKNTVYLRMNSLKPEDTAVYYCTATATGWGSPIPSAPGRWDYWGQGTQVTVSSEPKTPKGGCGGGLEHHHHHH

SEQ ID NO: 19 - protein, 155 aa, Homo sapiens
MASMTGGQQMGRNSAQVQLVESGGGLVQAGGSLRLSCAASGSTFSTNAVDWYRQAPGNQRDLVATITSGGHTNYADSVKGRFTISRDNAKNTVYLQMNSLKPEDTAVYYCAVPHYREDGYEYRFWGQGTQVTVSSEPKTPKGGCGGGLEHHHHHH

SEQ ID NO: 20 - protein, 158 aa, Homo sapiens
MASMTGGQQMGRNSADVQLVESGGGLVQAGGSLRLSCAASERTFSRYMLGWFRQAPGKEREFVGVMGWSDSDTYYGDAVKGRFTISRDNVKNTIYLQMKSLKPEDTAVYYCAASAYGSTRNHKLYEYWGQGTQVTVSSEPKTPKGGCGGGLEHHHHHH

SEQ ID NO: 21 - protein, 162 aa, Homo sapiens
MASMTGGQQMGRNSADVQLVESGGGSVQAGGSLRLSCAASGRTFSNYAMAWFRQAPGKEREFVAAVSRSGTNLYYADSVKGRFTISRDTAENTMYLQMNSLKPEDTAVYYCAAGLAERWGIGVQPRSEFLTTGARGPRSPSSEPKTPKGGCGGGLEHHHHHH

SEQ ID NO: 22 - protein, 163 aa, Homo sapiens
MASMTGGQQMGRNSAQVQLVESGGGSVQAGGSLRLSCAASGRTFSSYSMAWFRQAPGKEREFVAVMNCRYGDTDYPDSVKGRFTMSRDNAKNTLYLQMNSLKPEDTAVYYCAAKLIAYCGSGYYYRRNDYGYWGQGTQVTVSSEPKTPKGGCGGGLEHHHHHH

SEQ ID NO: 23 - protein, 151 aa, Homo sapiens
MASMTGGQQMGRNSAQVQLVESGGGLVQPGGSLRLSCAASGFTFSVNTMSWVRQAPGKGREWVSGIESHGNTYYSDSVKGRFTISRDNAKNTLYLQMNSLKPEDTAVYYCATGIYGTTRNWGQGTQVTVSSEPKTPKGGCGGGLEHHHHHH

SEQ ID NO: 24 - protein, 150 aa, Homo sapiens
MASMTGGQQMGRNSAQVQLVESGGGLVQAGGTFGSYVMGWFRQPPGKEREFVSGIMWNGTSTSTNYADSVKGRFTISRDNAKNTVFLQMNSLQPEDTAVYYCAASRSSALRTPVPLVEYWGQGTQVTVSSEPKTPKGGCGGGLEHHHHHH

SEQ ID NO: 25 - protein, 168 aa, Homo sapiens
MASMTGGQQMGRNSAEVQLVESGGGLVQAGGSLRLSCAASGRTFSGRTFSDYPMAWFRQAPGKEREFLATISTSGSRTYYADSVKGRFTISRDNAKDTVYLQMNSLKPEDAAIYYCAARQGSYYSDYNRALPGEYDYWGQGTQVTVSSEPKTPKGGCGGGLEHHHHHH

SEQ ID NO: 26 - protein, 161 aa, Homo sapiens
MASMTGGQQMGRNSAQVQLVESGGGLAQPGGSLRLSCAASGFTLDAYAIAWYRQAPGKDREEVACISSSGDSTNYAESVKGRFTISRDNAKKMGYLQMNSLKAEDTAIYYCAIDSRGCAWGGFAYYTFSHWGQGTQVTVSSEPKTPKGGCGGGLEHHHHHH

SEQ ID NO: 27 - protein, 155 aa, Homo sapiens
MASMTGGQQMGRNSADVQLVESGGDLVQAGGSLRLSCSASGNIFKINDMDWYRQAPGKQRELVARISSSGSTNYADSVKGRFTISRDNGKNTVYLQMNRVKPEDTAVYYCNADVQVSRNYEYEYWGQGTQVTVSSEPKTPKGGCGGGLEHHHHHH

SEQ ID NO: 28 - protein, 165 aa, Homo sapiens
MASMTGGQQMGRNSAQVQLVESGGGLVQPRGSLRLSCAASGFTWGDYAIGWFRQAPGKEREGVSCLSSSDGSTYYPDSVKDRFTISTDNAKNTVYLQMTNLKPDDTAIYYCAAREGPGASWYCSVNGYLTQPDSWGQGTQVTVSSEPKTPKGGCGGGLEHHHHHH

SEQ ID NO: 29 - protein, 159 aa, Homo sapiens
MASMTGGQQMGRNSAQVQLVESGGGLVQAGDSLLLSCGTSGRTFSSNTMGWFRQAPGKGREFVATITASGRGTNYGDSVRGRFTISRDNDKNTVYLQMNNLKPDDTGVYTCAASDSPYGSRWIEAYGYWGQGTQVTVSSEPKTPKGGCGGGLEHHHHHH

SEQ ID NO: 30 - protein, 162 aa, Homo sapiens
MASMTGGQQMGRNSAQVQLVESGGGLVQAGGSLRLSCAASGRTINNYDMGWFRQAPGKEREFVAAITWSGRDTNYADSVKGRFTVSRDDAKNTVYLQMNTLSPEDTAVYYCASARIQFYRLVAATRTDYSYWGQGTQVTVSSEPKTPKGGCGGGLEHHHHHH

SEQ ID NO: 31 - protein, 157 aa, Homo sapiens
MASMTGGQQMGRNSAHVQLVESGGGLVQAGGSLRLSCKASESIFKFDAMAWFRQAPGKERELVACIDNKQRTTYGDSVKGRFTISGLDVKNTAYLEMNSLKPEDTAVYYCTADRSTCFSNYRLYDYWGQGTQVTVSSEPKTPKGGCGGGLEHHHHHH

SEQ ID NO: 32 - protein, 160 aa, Homo sapiens
MASMTGGQQMGRNSAQVQLVESGGGLVRAGDSLRLSCVVSGRPISSYAMAWFRQAPGKDREVVAGISANGDRTHYADSIKGRFTVSRDNAKNSMTLQMNKLKPEDTAVYYCAADSLTEGGYGLTGDFDYWGQGTQVTVSSEPKTPKGGCGGGLEHHHHHH

SEQ ID NO: 33 - protein, 143 aa, Homo sapiens
MASMTGGQQMGRNSAEVQLVESGGSLRLSCSVSGGPFTSNGMGWYRQAPGKEREWVAAITNSGSANYADSVKGRFTVSMVNANNTMYLQMNNLKPDDTAVYYCNVAGWPHGYWGQGTQVTVSSEPKTPKGGCGGGLEHHHHHH

SEQ ID NO: 34 - protein, 157 aa, Homo sapiens
MASMTGGQQMGRNSAQVQLVESGGGLVQAGDSLRLSCAASGRTFSRYAMAWFRQAPGKEREFVAGISWTGRFTYYADSVKGRFTISRDDAKNTVYLQMNNLKPEDTGLYFCKVGDPYGVGLREYEWWGPGTQVTVSSEPKTPKGGCGGGLEHHHHHH

SEQ ID NO: 35 - protein, 160 aa, Homo sapiens
MASMTGGQQMGRNSAQVQLVESGGGLVQAGGSLRLSCAASGRTSRSFAMGWFRQAPGKGRDFVAAMTEFGTTYYADSVKGRFTISRDNAKNTVYLQMNVLQSEDTAVYYCAAHWDNTQWYVYEVGGYEHWGQGTQVTVSSEPKTPKGGCGGGLEHHHHHH

SEQ ID NO: 36 - protein, 139 aa, Homo sapiens
MASMTGGQQMGRNSAQVQLVESGGSLRLSCAASGFALSNSYMKWVRQAPGKGPEWVSTIYADGSTYYTDSVKGRFITSRDNSKNTMYLQMSDLKPEDTAVYYCANPSAKGQGTQVTVSSEPKTPKGGCGGGLEHHHHHH

SEQ ID NO: 37 - protein, 159 aa, Homo sapiens
MASMTGGQQMGRNSAEVQLVESGGGLVQAGDSLRLSCVASGDTFTSYTVGWFRQAPGKEQEFVAGISWSGRSTDYADFVKGRATISKDIAKVSLQMNALKPEDTAVYSCAAKKVDWSSDYVTNYDYDYRGRGTQVTVSSEPKTPKGGCGGGLEHHHHHH

SEQ ID NO: 38 - protein, 161 aa, Homo sapiens
MASMTGGQQMGRNSAEVQLVESGGGLVQAGGSLRLSCVASGHTDCISGMGWYRQAPGKERELVAVLIGGGNTYYGDSVKGRFTISKDKAKNTLYLQMKTLKPEDMAVYYCTADDHGSECPNKEMSSTATYWGQGTQVTVSSEPKTPKGGCGGGLEHHHHHH

SEQ ID NO: 39 - protein, 168 aa, Homo sapiens
MASMTGGQQMGRNSAHVQLVESGGELVQSGSSLRLSCAASGFDLDDYAIGWFRQAPGKEREGVSCTSTSDGPTSYLDSVKGRFTFSRDNAKNTLYLQMNSLKPEDTAVYYCAAISHIFAEDAPAMGLCWDQRSAFWYWGQGTQVTVSSEPKTPKGGCGGGLEHHHHHH

SEQ ID NO: 40 - protein, 165 aa, Homo sapiens
MASMTGGQQMGRNSAEVQLVESGGGLVQPGGSLTLSCAASGFHLDNTAIAWFRQAPGKEREGVSCLSSRDGSTFYQYSLKDRFTISGDNAKNTVYLQMKGLKPEDTATYYCAAALGIDSQRTVIAGCPKRYFAAWGQGTQVTVSSEPKTPKGGCGGGLEHHHHHH

SEQ ID NO: 41 - protein, 161 aa, Homo sapiens
MASMTGGQQMGRNSADVQLVESGGGLVQAGGSLRLSCVASGHTVSNYAMAWFRQAPGKEREFVAGISWRASITYYRDSVKGRFTISRDNAKNTVYLQMSSLKPEDTAVYYCASDKTHYVSRGTSLVEYDYWGQGTQVTVSSEPKTPKGGCGGGLEHHHHHH

SEQ ID NO: 42 - protein, 159 aa, Homo sapiens
MASMTGGQQMGRNSAHVQLVESGGGFVQAGGSLRLSCEASGRTFNVYTMGWFRQAPGKEREFVGSISWNGGSTYYADSVKGRFTISRDNAKNTVYLQMNSLEPEDTAVYYCAARRQSHLRLDLSVIDAWGKGTQVTVSSEPKTPKGGCGGGLEHHHHHH

SEQ ID NO: 43 - protein, 162 aa, Homo sapiens
MASMTGGQQMGRNSAEVQLVESGGGLVQAGGSLRLSCATSGRTSSTYAMGWFRQRPGKEREFVATIHWGVGSTIYADSVKGRFTLSRDNAQNTVYLQMNSLKPEDTAVYYCAASTYRIGSYDVSTSQGYNYWGQGTQVTVSSEPKTPKGGCGGGLEHHHHHH

SEQ ID NO: 44 - protein, 156 aa, Homo sapiens
MASMTGGQQMGRNSADVQLVESGGGLVQAGGSLRLSCVASGPIFSFSTGGWYRQAPGKQRELVAALTGGGNTNYADSVKGRFTISRDNAKNTVYLQMNLLKPEDTAVYYCQVMYYSGYDGYESTSWGQGTQVTVSSEPKTPKGGCGGGLEHHHHHH

SEQ ID NO: 45 - protein, 161 aa, Homo sapiens
MASMTGGQQMGRNSAEVQLVESGGGLVQPGGSLRLSCAASGSIFSINSMGWYRQAPGKQRELVAAITSGGSTNYANSVKGRFTISRNNARNTVWLQMNSLKPEDTAVYYCNADLNVVRGYSGDYHGSSDYWGQGTQVTVSSEPKTPKGGCGGGLEHHHHHH

SEQ ID NO: 46 - protein, 154 aa, Homo sapiens
MASMTGGQQMGRNSADVQLVESGGGLVQAGGSLRLSCAASGRTFSRYHMGWFRQAPGKERDVVAAISWSGDSTYYADSVKGRFTISKDNAKNTVYLQMDNLKPEDTAVYYCNVRGGVLRPYDYWGQGTQVTVSSEPKTPKGGCGGGLEHHHHHH

SEQ ID NO: 47 - protein, 160 aa, Homo sapiens
MASMTGGQQMGRNSAQVQLVESGGGLVQAGGSLRLSCAASERIFSNYAMGWFRQAPGKEREFVASIRGSGSQTSYADSVKGRFTISRDGAKDTVDLQMNSLKPEDTAVYYCSAKKYCGSTYNRAEGYDYWGQGTQVTVSSEPKTPKGGCGGGLEHHHHHH

SEQ ID NO: 48 - protein, 159 aa, Homo sapiens
MASMTGGQQMGRNSAQVQLVESGGGLVQAGGSLRLSCAASGRTFSTLSMGWFRQAPGQGREFVGGINYDGSSVEYADSVKGRFTISRDNAKNMMYLQMNSLKPEDTAAYYCASSRGYNTGTNPLGYDVWGQGTQVTVSSEPKTPKGGCGGGLEHHHHHH

SEQ ID NO: 49 - protein, 155 aa, Homo sapiens
MASMTGGQQMGRNSAEVQLVESGGGLVQAGGSLRLSCAASRSTFSINAAGWYRQAPGKQRELVAAISSGGSANYADSVKGRFIISRDNAKNTVYLQMNSLKPEDTAVYYCRVPYYRDDGYEYYSWGQGTQVTVSSEPKTPKGGCGGGLEHHHHHH

SEQ ID NO: 50 - protein, 158 aa, Homo sapiens
MASMTGGQQMGRNSAEVQLVESGGGLVQAGGSLRLSCAASGRTFSRYHMGWFRQAPGKERDVVAAISWSGDSTYYADSVKGRFTISKDNAKNTVYLQMDSLKPEDTAVYYCATLSGWDGDTIFPAGSWGQGTQVTVSSEPKTPKGGCGGGLEHHHHHH

SEQ ID NO: 51 - protein, 155 aa, Homo sapiens
MASMTGGQQMGRNSAQVQLVESGGGLVQAGGSLKLSCAASGITFSINTIGWYRQAPGKQREFVAHITSDSTTYYADSVKARFTISRDSAKNTVHLQMNNLKPEDTAVYYCNVNPTWPYGGEVDYWGQGTQVTVSSEPKTPKGGCGGGLEHHHHHH

SEQ ID NO: 52 - protein, 154 aa, Homo sapiens
MASMTGGQQMGRNSAEVQLVESGGGLVQAGGSLRLSCAASGSTFSSKPIGWYRQAPGKGRDLVAAIGGGSSTFYVDSVKGRFTMSRDNAKNTVALQMNSLKPEDTAVYYCNEYLGPKVLPIGSWGQGTQVTVSSEPKTPKGGCGGGLEHHHHHH

SEQ ID NO: 53 - protein, 159 aa, Homo sapiens
MASMTGGQQMGRNSAHVQLVESGGGLVQAGGSLRLSCVASGFTYSTYTMGWFRQAPGKEREIVAAKNWSGARIYYTESVKGRFTISRDSGSNTMYLQMDSLKPEDTAVYYCAARLTWTDTTTPTTYPYWGQGTQVTVSSEPKTPKGGCGGGLEHHHHHH

SEQ ID NO: 54 - protein, 161 aa, Homo sapiens
MASMTGGQQMGRNSAQVQLVESGGGLVKPGESLKLSCVASGETLSSYIMGWFRQAPGKEREFVAAVSWSGNQQDYADSVKGRFTISRDNAEKTVDLQMNSLNPEDTAVYYCAGDQIGFWSSRTQAHEYEYWGQGTQVTVSSEPKTPKGGCGGGLEHHHHHH

SEQ ID NO: 55 - protein, 157 aa, Homo sapiens
MASMTGGQQMGRNSAHVQLVESGGGLVQAGGSLRLSCAASEDTFDNYAVAWFRQARGKEREFVAVISWGGGRSTDYTDSVKGRFSISRDNAKNTVDLQMSSLKPDDTAVYYCHAQYYYEDGYEHESWGQGTQVTVSSEPKTPKGGCGGGLEHHHHHH

SEQ ID NO: 56 - protein, 147 aa, Homo sapiens
MASMTGGQQMGRNSAHVQLVESGFAFSSYAMSWVRQAPTYGREWVAGIYNDGSHIYYADSVKGRFSISRDNVGNTLYLQLNSLQPNDTALYRCVQEHARGFGGWGNPNPTDLVYRAWGRGTQVTVSSEPKTPKGGCGGGLEHHHHHH

SEQ ID NO: 57 - protein, 162 aa, Homo sapiens
MASMTGGQQMGRNSAEVQLVESGGGLVQPGGSLRLSCAASGFTLDYYAIGWFRQAPGKEREGVSCISSSDGSTYYADSVKGRFTISRDNAKNTVDLQMDRLKPEDTAVYYCAADRGSLYSSGRARAQDYTYWGRGTQVTVSSEPKTPKGGCGGGLEHHHHHH

SEQ ID NO: 58 - protein, 161 aa, Homo sapiens
MASMTGGQQMGRNSAEVQLVESGGGLVQAGGSLRLSCAGSGDTFSRYTLGWFRQAPGKEREFVAGISWSGGSTSYANSVKGRFTISRDNAKNTMYLQMNSLKPEDTAVYTCAAPGLPGTVVVGASDFYVYWGQGTQVTVSSEPKTPKGGCGGGLEHHHHHH

SEQ ID NO: 59 - protein, 151 aa, Homo sapiens
MASMTGGQQMGRNSADVQLVESGGSLRLSCAASGRTINTVGLAWFRQAPGQQRDFVAGIEIGGALRYADSVQGRFTVSRDNAKNTMYLQMNSLKPEDTAVYYCGASRGFNIGINPLGYGGWGQGTQVTVSSEPKTPKGGCGGGLEHHHHHH

SEQ ID NO: 60 - protein, 144 aa, Homo sapiens
MASMTGGQQMGRNSAEVQLVESGGSLRLSCAASGSGFSSSIIAWYRQAPGKQRELVAAIGGPGSTNYADFVEGRFTISRDNAKNTGYLQMNNLNPEDTAVYYCNEVTRSGREYWGQGTQVTVSSEPKTPKGGCGGGLEHHHHHH

SEQ ID NO: 61 - protein, 154 aa, Homo sapiens
MASMTGGQQMGRNSAQVQLVESGGSLRLSCVASGHTDCISGMGWYRQAPGKERELVAVLIGGGNTYYGDSVKGRFTISKDKAKNTLYLQMKTLKPEDTAVYYCTADDHGSECPNKEMSSTSTYWGQGTQVTVSSEPKTPKGGCGGGLEHHHHHH

SEQ ID NO: 62 - protein, 140 aa, Homo sapiens
MASMTGGQQMGRNSAEVQLVESGGALVQAGGSLRLSCLVSGNIYNIKSVGWYRQAPGKEREDNVKNTVDLQMNSLKPEDAAVYYCNARDSSRPRSLPASPESLDGRMDVWGKGTQVTVSSEPKTPKGGCGGGLEHHHHHH

SEQ ID NO: 63 - protein, 165 aa, Homo sapiens
MASMTGGQQMGRNSAQVQLVESGGGLVQPGGSLRLSCKASGFAFSSYAMSWVRQAPRYGREWVAGIYNDGSHIYYADSVKGRFSISRDNVGNTLYLQLNSLQPNDTALYRCVQEHERGFGGWGNPNPTDLVYRAWGRGTQVTVSSEPKTPKGGCGGGLEHHHHHH

SEQ ID NO: 64 - protein, 155 aa, Homo sapiens
MASMTGGQQMGRNSAHVQLVESGGGLVQAGGSLRLSCKVSGTTFSNSAIGWYRQAPGNRRELVATINYGGSTNYADSGKGRFTISKDNAKNTVYLQMNSLKPEDTAVYYCKTTEWREDGYEYDVWGQGTQVTVSSEPKTPKGGCGGGLEHHHHHH

SEQ ID NO: 65 - protein, 162 aa, Homo sapiens
MASMTGGQQMGRNSAQVQLVESGGGLVQAGGSLRLSCATSGRTFSTYALGWFRQRPGKEREFVATIHWSDGRTLYADSVKGRFTLSRDNAQNTVYLQMNSLKPEDTAIYYCAASIYRIGSYDVSTSQGYDYWGQGTQVTVSSEPKTPKGGCGGGLEHHHHHH

SEQ ID NO: 66 - protein, 162 aa, Homo sapiens
MASMTGGQQMGRNSAQVQLVESGGGLVQAGGSLRLSCATSGRTFSTYAMGWFRQRPGKEREFVATIHWSDGRTLYTDSVKGRFTLSRDNAQNTVYLQMNSLKPEDTAVYYCAAATYRIGSYDVSTSQGYNYWGQGTQVTVSSEPKTPKGGCGGGLEHHHHHH

SEQ ID NO: 67 - protein, 161 aa, Homo sapiens
MASMTGGQQMGRNSAHVQLVESGGGLVQAGGSLRLSCVASGHTVSNYAMAWFRQAPGKEREFVAGISWRATLTYYRDSVKGRFTISRDNAKNTVYLQMSSLKPEDTAVYFCASDRTPYVSRGTSLVEYDYWGQGTQVTVSSEPKTPKGGCGGGLEHHHHHH

SEQ ID NO: 68 - protein, 155 aa, Homo sapiens
MASMTGGQQMGRNSAEVQLVESGGGLVQAGGSLRLSCTASGSIFSVNVMDWYRQAPGKQREFVATITGSGATNYADSVKGRFTISRGSAKNTVYLQMNSLKPDDTAVYYCHNADYREDGYEYDNWGQGTQVTVSSEPKTPKGGCGGGLEHHHHHH

SEQ ID NO: 69 - protein, 159 aa, Homo sapiens
MASMTGGQQMGRNSAQVQLVESGGGLVQAGGSLRLSCVDSGRTFSSNTMGWFRQAPGKDRDFVAAINRSGVITNYADSVKGRFTISRDNAKNTVYLQLNSLKPEDTAVYYCAARAGGWPSQIPVEYDRWGQGTQVTVSSEPKTPKGGCGGGLEHHHHHH

SEQ ID NO: 70 - protein, 157 aa, Homo sapiens
MASMTGGQQMGRNSAQVQLVESGGGLVQAGGSLRLSCAASGATFSINAIGWYRQAPGKQRELVAVIKSGNSINYADSVKGRFTISRDHAKNTVYLQMNNLKPEDTAVYYCHADQPPETGWGTWNDLWGQGTQVTVSSEPKTPKGGCGGGLEHHHHHH

SEQ ID NO: 71 - protein, 163 aa, Homo sapiens
MASMTGGQQMGRNSAQVQLVESGGGSVQAGGSLRLSCAASGRTSVSYAMGWFRQAPGKEREFVAAVSRSGTNLYYADSVKGRFTISRHTAENTMYLQMNSLLPEDTALYYCAADEALRWGIGTQPRSEFFDYWGQGTQVTVSSEPKTPKGGCGGGLEHHHHHH

SEQ ID NO: 72 - protein, 150 aa, Homo sapiens
MASMTGGQQMGRNSAQVQLVESGGGLVQPGGSLRLSCATSGSTFSINGIGWYRQVPGIEREFVAGVSTDGKANYADSVAGRFTISINDGKNTAYLQMNSLKPEDTAVYYCNVDSTKGYYWGQGTQVTVSSEPKTPKGGCGGGLEHHHHHH

SEQ ID NO: 73 - protein, 158 aa, Homo sapiens
MASMTGGQQMGRNSAEVQLVESGGGLVQAGGSLRLSCAASGRTFSDDAMAWFRQAPGKEREFVAAISWHPENTFYADSVKGRFTISRDKTKNTEYLQMNSLKPEDTAVYYCAAGPRLEIGDYAQYKYWGQGTQVTVSSEPKTPKGGCGGGLEHHHHHH

SEQ ID NO: 74 - protein, 159 aa, Homo sapiens
MASMTGGQQMGRNSAQVQLVESGGGLVQPGGSLTLSCAASGSTIDDGIGWFRQASGKEREGVSCIRLSDGSKYYRDIVKGRFTISRDNAKNTVYLQMNSLKPEDTAVYYCANGPCTGPRAIAEILYGAWGQGTQVTVSSEPKTPKGGCGGGLEHHHHHH

SEQ ID NO: 75 - protein, 162 aa, Homo sapiens
MASMTGGQQMGRNSAHVQLVESGGGLVQAGASLRLTCGPSGRSVGLYTMGWFRQAPGKEREFVAGVTYLGDTTTYSDAVKGRFTISRENNKNTVYLRMNSLKPEDTAVYYCTATATGWGSPIPSAPGRWGYWGQGTQVTVSSEPKTPKGGCGGGLEHHHHHH

SEQ ID NO: 76 - protein, 157 aa, Homo sapiens
MASMTGGQQMGRNSAQVQLVESGGGLVQPGGSLRLSCVVSGFPFSEYAMSWVRQTPEKGREWVSGIYTDGSETLYENSVKGRFTISRDNTKNTLYLQMNNLKPEDTARYYCKLGDPYGVGLRDYEYLGHGTQVTVSSEPKTPKGGCGGGLEHHHHHH

SEQ ID NO: 77 - protein, 155 aa, Homo sapiens
MASMTGGQQMGRDPAQVQLVESGGGLVQAGGSLRLSCTASRSTFRVNPAGWYRQAPGKERELVARITSGGSTNYADSVKGRFTISRDNAKNTVYLQMNSLKPEDTAVYYCNVPYYMEDGYEHDAWGQGTQVTVSSEPKTPKGGCGGGLEHHHHHH

SEQ ID NO: 78 - protein, 153 aa, Homo sapiens
MASMTGGQQMGRDPADVQLVESGGGLVQAGGSLRLSCTASQSILYINVMGWYRQAPGKQRELVAEIPTGGNTDYADSVKGRFTISRDNVKNTVSLQMNSLKPEDTAVYYCNVRGGVLSPYDYWGQGTQVTVSSEPKTPKGGCGGGLEHHHHHH

SEQ ID NO: 79 - protein, 162 aa, Homo sapiens
MASMTGGQQMGRDPADVQLVESGGGLVQAGGSLRLSCATSGRTFSTYAAGWFRQRPGKEREFVATIHWNDGRTLYADSVKGRFTLSRDNAQNTVYLQMNSLKPEDTAVYYCAAYTYRIGSYDVSTSQGYDYWGQGTQVTVSSEPKTPKGGCGGGLEHHHHHH

SEQ ID NO: 80 - protein, 161 aa, Homo sapiens
MASMTGGQQMGRDPAQVQLVESGGGLVQAGASLRLSCAASRGTFSSYTMGWFRQAPGKERLFVASISRDGGTTYYADSVKGRFTISRDNAENILYLQMNSLKPEDTAVYYCAAASRHPSTWEVWGLEYYYWGQGTQVTVSSEPKTPKGGCGGGLEHHHHHH

SEQ ID NO: 81 - protein, 154 aa, Homo sapiens
MASMTGGQQMGRDPAEVQLVESGGELVQAGGSLRLSCAASGRTDSVTRMAWFRQAPGKEREFVAAITWSSGYTYYPDSVKGRFTISRDNAKNTMYLQMNSLKAEDTAVYICAAAVGVISEYNSWGQGTQVTVSSEPKTPKGGCGGGLEHHHHHH

SEQ ID NO: 82 - protein, 156 aa, Homo sapiens
MASMTGGQQMGRDPAHVQLVESGGGLVQAGGSLRLSCAASGKIFSLSTMGWYRQAPGKQRELVAALTSGGSTNYADSVKGRFTISRDNAKYTTYLQMNSLKPEDTAVYYCNVRYYSGYDGYESNSWGQGTQVTVSSEPKTPKGGCGGGLEHHHHHH

SEQ ID NO: 83 - protein, 158 aa, Homo sapiens
MASMTGGQQMGRDPAQVQLVESGGGLVQAGGSLRLSCAASRRTFSIYNMGWFRQAPGKEREFVATITRYGDRTYTADSVKGRFTISSDQAKNTVYLQMNSLNPHDTAVYYCAADSAYSGPDFKHYDYWGQGTQVTVSSEPKTPKGGCGGGLEHHHHHH

SEQ ID NO: 84 - protein, 158 aa, Homo sapiens
MASMTGGQQMGRDPADVQLVESGGGLVQPGGSLRLSCAASGSTFSINAIGWYRQAPGKEREFVAALRWPGNIWYYADFVEGRITISRDNAKNTVYLQMNSLKPEDTAVYYCAATVGLDSPPRNEYDYWGQGTQVTVSSEPKTPKGGCGGGLEHHHHHH

SEQ ID NO: 85 - protein, 157 aa, Homo sapiens
MASMTGGQQMGRDPAHVQLVESGGGLVQPGGSLRLSCAASGFTFSTYAMGWVRQAPGKGPEWVATIYSKGDTTHYANSAKGRFTISRDNARNTLYLQMNSLKPEDTAVYYCAKGISDSYLRVESNYRGQGTQVTVSSEPKTPKGGCGGGLEHHHHHH

SEQ ID NO: 86 - protein, 162 aa, Homo sapiens
MASMTGGQQMGRDPAEVQLVESGGGLVQAGDSLRLSCAASGRTFSSYTMGWFRQAPGKEREFVAGIRWSGGSTYFTNYEDSVKGRFTISKDNAKNTVFLQMNSLRPEDTAVYYCAFTGHYSTYDSPQRYDYWGQGTQVTVSSEPKTPKGGCGGGLEHHHHHH

SEQ ID NO: 87 - protein, 163 aa, Homo sapiens
MASMTGGQQMGRDPAEVQLVESGGGLVQAGDSLRLSCAASGRTFSSYNLGWFRQAPGKEREFVAVMNCRYGDTDYPDSVKGRFTMSRDNAKNTLYLEMNNLKPEDTAVYYCAAKVLAYCGSGYYYRRNDYGYWGQGTQVTVSSEPKTPKGGCGGGLEHHHHHH

SEQ ID NO: 88 - protein, 161 aa, Homo sapiens
MASMTGGQQMGRDPAEVQLVESGGGLVKPGESLKLSCVASGETLSSYIMGWFRQAPGKEREFVAAVSWSGNQQDYADSVKGQFTISRDNAEKTVDLQMNSLNPEDTAVYYCAGDQMGFWSSRTQAHEYEYWGQGTQVTVSSEPKTPKGGCGGGLEHHHHHH

SEQ ID NO: 89 - protein, 155 aa, Homo sapiens
MASMTGGQQMGRDPAEVQLVESGGGLVQAGGSLSLSCAASGSINSINAMGWFRQAPGKQRELVATITRGGSTNYADSVKGRFTISIDNAKNTVYLQMNSLKPEDTAVYYCNADRGTDDGWLYDYWGQGTQVTVSSEPKTPKGGCGGGLEHHHHHH

SEQ ID NO: 90 - protein, 158 aa, Homo sapiens
MASMTGGQQMGRDPADVQLVESGGGLVQAGGSLRLSCAASGLTFSNYAMGWFRQAPGKEREFAAGITWNGGASHYADSVKGRFTISRDNAQNTVYLQMNSLKPEDTAVYYCAARLGSVAYPGLRYDYWGQGTQVTVSSEPKTPKGGCGGGLEHHHHHH

SEQ ID NO: 91 - protein, 163 aa, Homo sapiens
MASMTGGQQMGRDPAEVQLVESGGGLVQAGGSLRLSCAASGRTFSDYPMAWFRQALGKEREFLATISTSGSRTMYADSVKGRFTISRDNAKNMMYLQMNSLKPEDAAVYYCAARQGSYYSDYNRALPGEYHYWGQGTQVTVSSEPKTPKGGCGGGLEHHHHHH

SEQ ID NO: 92 - protein, 159 aa, Homo sapiens
MASMTGGQQMGRDPADVQLVESGGGLVKPGESLKLSCVASGETLSSYIMGWFRQAPGQGRKFVGGINYSGSSVEYADSVKGRFTISRDNAKNTMYLQMNSLKPEDTAAYYCASSRGYNTGTNPLGYNYWGQGTQVTVSSEPKTPKGGCGGGLEHHHHHH

SEQ ID NO: 93 - protein, 151 aa, Homo sapiens
MASMTGGQQMGRDPAQVQLVESGGGLVQPGGSLRLSCAASGSGFSSSIIGWHRQAPGKQRELVAAIGGPGSTNYADSVKGRFTISRDNAKNTAYLQMNNLKPEDSAVYYCEATTRSGREYWGQGTQVTVSSEPKTPKGGCGGGLEHHHHHH

SEQ ID NO: 94 - protein, 165 aa, Homo sapiens
MASMTGGQQMGRDPAHVQLVESGGGLVQPGGSLRLSCVASGFTFSAYAMSWVRQVPGKGREWISGIYNDGSNIYYTDSVKGRFSISRDNAKNTLYLQMNNLKPDDTAVYYCTKEHARGFGGRGNPNPSDLVYDAWGQGTQVTVSSEPKTPKGGCGGGLEHHHHHH

SEQ ID NO: 95 - protein, 163 aa, Homo sapiens
MASMTGGQQMGRDPAHVQLVESGGGLVQAGGSLRLSCAASGRTFSSYAMAWFRQAVGKEREFVAAVSRSGTNLYYADSVKGRFTISRDTAKNTMYLQMNSLKPEDTALYYCAAGEALRWGIGQQPRSEFFDYWGQGTQVTVSSEPKTPKGGCGGGLEHHHHHH

SEQ ID NO: 96 - protein, 155 aa, Homo sapiens
MASMTGGQQMGRDPADVQLVESGGGLVQAGGSLKLSCAAFGVTFDINTIAWYRQAPGKQREFVAHITSGGTTYYADSVKARFTMSRDSAKNTVYLQMNNLKPEDTAVYYCNVNPTWPYSGEVDYWGQGTQVTVSSEPKTPKGGCGGGLEHHHHHH

SEQ ID NO: 97 - protein, 155 aa, Homo sapiens
MASMTGGQQMGRDPAEVQLVESGGGLVQAGGSLRLSCTASRSTFRVNPAGWYRQAPGKERELVARITSGGSTNYADSVKGRFTISRDNAKNTVYLQMNSLKPEDTAVYYCNVPCYMEDGYEHDAWGQGTQVTVSSEPKTPKGGCGGGLEHHHHHH

SEQ ID NO: 98 - protein, 162 aa, Homo sapiens
MASMTGGQQMGRDPAQVQLVESGGGLVQAGDSLRLSCATSGRTFSTYAAGWFRQRPGKEREFVATIHWNDGRTLYADSVKGRFTLSRDNAQNTVYLQMNSLKPEDTAVYYCAASTYRIGSYDVSTSQGYDYWGQGTQVTVSSEPKTPKGGCGGGLEHHHHHH

SEQ ID NO: 99 - protein, 159 aa, Homo sapiens
MASMTGGQQMGRDPGSSSGSMAQVQLVESGGGLVQPGGSLRLSCVASGIMFDIYTMRWYRQAPGKQRELVAAITGAGRANYNDDSVKGRFTISRDNAKNTVYLQMNRMKPEDTALYECNTEILGGGPNYWGRGTQVTVSEPKTPKGGKGGGLEHHHHHH

SEQ ID NO: 100 - protein, 165 aa, Homo sapiens
MASMTGGQQMGRDPENLYFQGAQVQLVESGGGLVQAGGSLRLSCTASGRTFTPYTIGWFRQAPGKEREFVASILWSGINTDYADSVKGRFAISRDNAKNAAYLQMSNLKPEDTAVYYCATGGGLGYYRSVSQYDYWGQGTQVTVSEPKTPKGGKGGGLEHHHHHH

SEQ ID NO: 101 - protein, 165 aa, Homo sapiens
MASMTGGQQMGRDPENLYFQGAQVQLVESGGGLVQAGGSLRLSCVASGRTFEPFVMGWFRQAPGKEREFVATISWSGGSLSYADSVKGRFTVSRDNAKNTVYLQMNSLKPEDTAVYYCAAAPGVGNYRYTFQYDYWGQGTQVTVSEPKTPKGGKGGGLEHHHHHH

SEQ ID NO: 102 - protein, 164 aa, Homo sapiens
MASMTGGQQMGRDPNSAHVQLVESGGGLVQTGGSLRLACAASGRAFSTYAMGWFRQAPGKEREFVASINRSGSSTYYADSVKGRFTISRDNGKDTVYLQMNRLIPEDTAVYYCAADSEGVGFRNMLEYDYWGQGTQVTVSSEPKTPKGGCGGGAAALEHHHHHH

SEQ ID NO: 103 - protein, 160 aa, Homo sapiens
MASMTGGQQMGRDPNSAEVQLVESGGGLVQAGGSLRLSCAASGRTFIPYTTGWFRQTPGKEREFVATITWSGISTKYADSVKGRFTISRDNAKNTVYLQMNSLKPEDTAVYYCTKNPRALALNRDYWGQGTQVTVSSEPKTPKGGCGGGAAALEHHHHHH

SEQ ID NO: 104 - protein, 162 aa, Homo sapiens
MASMTGGQQMGRDPNSAEVQLVESGGGLVQVGGSLTLSCAAAGSTFTTNAMAWFRQFPGKERELVAAISWGGLGYVADSVRGRFTISRPTKNMMILQLNSLEREDTAIYYCAARKMSTVATEATMYAYWGHGTQVTVSSEPKTPKGGCGGGAAALEHHHHHH

SEQ ID NO: 105 - protein, 173 aa, Homo sapiens
MASMTGGQQMGRDPNSADVQLVESGGGSVQAGGSLRLSCAASGGTFSSYAMGWYRQAPGKEREFVSGISWSGSSIDYVDSVKGRFTISRDNAKNTVYLQMNSLKPEDTAVYYCGAADPMGLGYGLGPRPVDRLLSAECDYWGQGTQVTVSSEPKTPKGGCGGAAALEHHHHHH

SEQ ID NO: 106 - protein, 170 aa, Homo sapiens
MASMTGGQQMGRDPNSADVQLVESGGGLVQAGGSLRLSCAASGRTFSSYAMGWFRQAPGKEREFVSAISRSGGSTYYTDSVKGRFTISRDNAKNTVYLQMNSLKPEDTAVYYCAAAEGLASGSYDYTPPLKSSWYDYWGQGTQVTVSSEPKTPKGGCGGAAALEHHHHHH

SEQ ID NO: 107 - protein, 163 aa, Homo sapiens
MASMTGGQQMGRDPNSAEVQLVESGGGLVQAGGSLRLSCVASGRTFSYRAMGWFHQAPGKEREFVAAVGSSGLTTYYADSVKGRFTISRDNAKNTVYLQMNSLQLEDTAVYYCAAAKFGYVVVTAKEYEYWGQGTQVTVSSEPKTPKGGCGGAAALEHHHHHH

SEQ ID NO: 108 - protein, 164 aa, Homo sapiens
MASMTGGQQMGRDPNSADVQLVESGGGLVQAGGSLRLSCRASGLPFGPYTMGWFRQTPGQEREFVAAITWSSMNTNYADSVKGRFTISRDSAKNTVYLQMNTLKPDDTAVYYCAADDRAVPMLGDFEDYIYWGQGTQVTVSSEPKTPKGGCGGAAALEHHHHHH

SEQ ID NO: 109 - protein, 162 aa, Homo sapiens
MASMTGGQQMGRDPNSAQVQLVESGGGLVQVGGSLRLSCAASGRTFSNYVMGWFRQAPGKEREFVAYIHWSGSSTSYADSVKGRFTISRDNTKNTMYLQMNSLKPEDTAVYYCTADQYASTLLRAAGEYWGQGTQVTVSSEPKTPKGGCGGAAALEHHHHHH

SEQ ID NO: 110 - protein, 162 aa, Homo sapiens
MASMTGGQQMGRDPNSAHVQLVESGGGLVQAGGSLRLSCVSSGRTYRWNAMGWFRQAPGKEREFVAAIDWDGRNTDYADSVKGRFTISRDNAKNTVFLQMNRLKSEDTAVYSCALDRVVITSMRTNFDVWGQGTQVTVSSEPKTPKGGCGGAAALEHHHHHH

SEQ ID NO: 111 - protein, 166 aa, Homo sapiens
MASMTGGQQMGRDPNSAHVQLVESGGGLVQAGGSLRLSCAASGRTFSTYHMGWFRQAPGKAREFVAAITGSGGITYYADSVKGRFTISRDNAKNTVYLQMNSLKPEDTAVYYCAADTRAYGLVPSTTSSRYNYWGQGTQVTVSSEPKTPKGGCGGAAALEHHHHHH

SEQ ID NO: 112 - protein, 163 aa, Homo sapiens
MASMTGGQQMGRDPNSAHVQLVESGGGLVQAGGSLRLSCTASGRTFTPYTMGWFRQAPGKEREFVASILWSGNNRDYADSVKDRFAISRDNAKNTAYLQMNSLKPEDTAVYYCAAGDGLGFYRSVNQYDYWGQGTQVTVSSEPKTPKGGCGGAAALEHHHHHH

SEQ ID NO: 113 - protein, 162 aa, Homo sapiens
MASMTGGQQMGRDPNSAQVQLVESGGGLVQAGDSLRLSCAASERTSNYAMGWFRQAPGKEREFVADINHTGGRRKYGDSVKGRFTISRDNAENMVYLQMNNLQVEDTAVYYCATGLRYDVSGYAPDYRYWGRGTQVTVSSEPKTPKGGCGGAAALEHHHHHH

SEQ ID NO: 114 - protein, 164 aa, Homo sapiens
MASMTGGQQMGRDPNSAQVQLVESGGGLVQTGGSLTLSCAASGRTFSTKSMGWFRQAPGKEREFVADINWNGGITHYADSVEGRFTISRDNANDMVYLQMNSLKPEDTAVYYCAGGRYSTLFSKSEADYDYWGQGTQVTVSSEPKTPKGGCGGAAALEHHHHHH

SEQ ID NO: 115 - protein, 162 aa, Homo sapiens
MASMTGGQQMGRDPNSAQVQLVESGGGLAQAGGSLRLSCAASGGTFSNSCMGWFRQAPGMEREFVVIIRSTGHTTYADSVEGRFTVSREIAKNTVYLEMNSLKPEDTAVYVCAAGVSDYGCYRTSGINYWGQGTQVTVSSEPKTPKGGCGGAAALEHHHHHH

SEQ ID NO: 116 - protein, 163 aa, Homo sapiens
MASMTGGQQMGRDPNSAEVQLVESGGGLVQAGGSLRLSCTASGPKDTPYTMGWFRQVPGKEREFVASVLWSGINTDYADSVKGRFAISRNNAKNTMYLQMNSLKPEDTAVYYCAAGYGLGFYRSISQYDYWGHGTQVTVSSEPKTPKGGCGGAAALEHHHHHH

SEQ ID NO: 117 - protein, 163 aa, Homo sapiens
MASMTGGQQMGRDPNSAHVQLVESGGGLVQAGGSLRLSCTASGPKDTPYTMGWFRQVPGKEREFVASVLWSGINTDYADSVKGRFAISRNNAKNTMYLQMNSLKPEDTAVYYCAAGYGLGFYRSVSQHDYWGHGTQVTVSSEPKTPKGGCGGAAALEHHHHHH

SEQ ID NO: 118 - protein, 163 aa, Homo sapiens
MASMTGGQQMGRDPNSAEVQLVESGGGLVQAGGSLRLSCTASGPKDTPYTMGWFRQVPGKEREFVASVLWSGINTDYADSVKGRFAISRNNAKNTMYLQMNSLKPEDTAVYYCAAGYGLGFYRTVSQYDYWGHGTQVTVSSEPKTPKGGCGGAAALEHHHHHH

SEQ ID NO: 119 - protein, 168 aa, Homo sapiens
MASMTGGQQMGRDPNSAQVQLVESGGGLVQAGGSLRLSCAASGYTSGNDAMGWFRQAPGKEREFVGAIRWSGVSTYYADSVKGRFTISRDGAKNTLYLQMNSLKPEDTAVYYCAAKFTGSAWYGVQKLESTYWDYWGQGTQVTVSSEPKTPKGGCGGAAALEHHHHHH

SEQ ID NO: 120 - protein, 163 aa, Homo sapiens
MASMTGGQQMGRDPNSAHVQLVESGGGLVQAGGSLRLSCTASARTSNAMGWFRRAPGKERDFVAAISESGRTTDYADSVKGRFTISRDTAKNTVYLQMISLKPEDTAVYYCARKRVADAISSNYEFRYDYWGQGTQVTVSSEPKTPKGGCGGAAALEHHHHHH

SEQ ID NO: 121 - protein, 165 aa, Homo sapiens
MASMTGGQQMGRDPNSADVQLVESGGGLVQAGGSLTLSCAASGRTFSSSTMGWFRRAPGKEREFVAAISGSARTTDYADSVKGRFTISRDNAKNTVYLQMISLKPEDTAIYYCARKRVVDVTTSNYELRYDYWGQGTQVTVSSEPKTPKGGCGGAAALEHHHHHH

SEQ ID NO: 122 - protein, 164 aa, Homo sapiens
MASMTGGQQMGRDPNSAQVQLVESGGGLVQAGGSLRLSCVSSGRTYRWNAMGWFRQAPGKEREFVAAIDWDGRNTDYADSVKGRFTISRDNAKNTVYLQMNSLKVEDTAIYYCAAREWGSGGYSSIASYAYWGQGTQVTVSSEPKTPKGGCGGAAALEHHHHHH

SEQ ID NO: 123 - protein, 163 aa, Homo sapiens
MASMTGGQQMGRDPNSADVQLVESGGGLVQAGGSLRLSCAASGRTISDYGMAWFRQAPGKEREFVGVITSNSVTTYYADSVKGRFTISRDNTKNTVYLQMISLKPEDTAIYYCAARIPVGFYYNARNYDFWGQGTQVTVSSEPKTPKGGCGGAAALEHHHHHH

SEQ ID NO: 124 - protein, 156 aa, Homo sapiens
MASMTGGQQMGRDPNSAQVQLVESGGGLVQAGGSLRLSCAASGRTPYVMGWFRQAPGNEREFVASISWTYGYTNYANSVKGRFRISKDNAKNTVLLQMNSLKPEDTAVYYCAARRGEDPEYDYWGQGTQVTVSSEPKTPKGGCGGAAALEHHHHHH

SEQ ID NO: 125 - protein, 164 aa, Homo sapiens
MASMTGGQQMGRDPNSAHVQLVESGGGLVQAGGSLRLSCIASGRTFSTYHMGWFREAPGKGREFVAAITQNGGTTYYADSVKGRFTISRDNAKNTVYLQMGSLKPEDTAVYYCAASPALIGRIYFGNENYSWGQGTQVTVSSEPKTPKGGCGGAAALEHHHHHH

SEQ ID NO: 126 - protein, 162 aa, Homo sapiens
MASMTGGQQMGRDPNSADVQLVESGGGLAQAGGSLRLSCAASGRTFSNECMGWFRQAPGKEREFVATIRSTGHISYATSVQGRFTVSRDIAKNTVYLEMNNLKPEDTAVYSCGAGVSDYGCYRTSGYNYWGQGTQVTVSSEPKTPKGGCGGAAALEHHHHHH

SEQ ID NO: 127 - protein, 163 aa, Homo sapiens
MASMTGGQQMGRDPNSAQVQLVESGGGLVPAGGSLRLSCAASGRTFSLYRMGWFRQAPGKEREFVAAIIWSSGSTYYADSVKGRFTISRDIAKNTVYLEMNSLKPEDTAVYSCGAGVSDYGCYRTSGYAYWGQGTQVTVSSEPKTPKGGCGGAAALEHHHHHH

SEQ ID NO: 128 - protein, 162 aa, Homo sapiens
MASMTGGQQMGRDPNSAHVQLVESGGGLAQAGGSLRLSCAASGGTFSNSCMGWFRQAPGMEREFVAIIRSTGHTTYADSVEGRFTVSRDIAKNTVYLEMNSLKPEDTAVYSCVAGVSDYGCYRTSGIKYWGQGTQVTVSSEPKTPKGGCGGAAALEHHHHHH

SEQ ID NO: 129 - protein, 166 aa, Homo sapiens
MASMTGGQQMGRDPNSAQVQLVESGGGLVQPGGSLRLSCTPSGFRLEDYPIAWFRQAPGKEREGLSCITSGDGRTYYEESVKGRFTISRDNAQNKVYLQMNKLTPEDTAVYHCATVPSDNLCGYLHRRPFASWGQGTQVTVSSEPKTPKGGCGGGAAALEHHHHHH

SEQ ID NO: 130 - protein, 170 aa, Homo sapiens
MASMTGGQQMGRDPNSAHVQLVESGGGLVQAGGSLRLSCAASDTIDNYARAWFRQAPGKEREFVAAITWTFGTPYYTDSVKGRFTISRDDAKNTVYLQMNSLKPEDTAVYYCAASLYLPVRTASGGYRLDTDRPQYWGQGTQVTVSSEPKTPKGGCGGGAAALEHHHHHH

SEQ ID NO: 131 - protein, 167 aa, Homo sapiens
MASMTGGQQMGRDPNSAHVQLVESGGGLVQAGGSLRLSCAASGRTLSSYDMGWFRQPPGKEREFVAAITRHDFNTFYRDSVKGRFTISRDNAKNTVYLQMNSLKSEDTAVYFCAARLDPIFASNSEYAPLYDYWGQGTQVTVSSEPKTPKGGCGGGAAALEHHHHHH

SEQ ID NO: 132 - protein, 167 aa, Homo sapiens
MASMTGGQQMGRDPNSAQVQLVESGGGLVQAGGSLRLSCAASGRTLSSYDMGWFRKAPGKEREFVAAITRHDYNTYYRDSVKGRFTISRDNAKNTVYLQMNSLKSEDTAVYFCAARLDPIFASNSAYSNLYDYWGQGTQVTVSSEPKTPKGGCGGGAAALEHHHHHH

SEQ ID NO: 133 - protein, 157 aa, Homo sapiens
MASMTGGQQMGRDPNSAEVQLVESGGGLVQAGGSLRVSCAVSGISIYHSGWYRQAPGKERELVAGISRGGSTNYADSVKGRFTISRDSGENTVYLQMNSLKPEDTAVYYCKIDWDYRGVSQTAWGQGTQVTVSSEPKTPKGGCGGGAAALEHHHHHH

SEQ ID NO: 134 - protein, 164 aa, Homo sapiens
MASMTGGQQMGRDPNSAEVQLVESGGGLVQAGGSLRLSCAAPAIALADYAIGWFRQGPGKEREGISCVASETDTTRYADSVKGRFTISRDNAKNLVYLQMNSLKPDDTAVYYCATEVMECRGLSYNAWGSWGQGTQVTVSSEPKTPKGGCGGGAAALEHHHHHH

SEQ ID NO: 135 - protein, 163 aa, Homo sapiens
MASMTGGQQMGRDPNSAQVQLVESGGGLVQAGGSLRLSCAASGLTFSNYALGWFRRAPGKERDFVAAISYSGGSTDYADSVKGRFTISRDNAKNTVYLQMNSLKPEDTAVYYCAAAYLGWGTARTAYEYWGQGTQVTVSSEPKTPKGGCGGGAAALEHHHHHH

SEQ ID NO: 136 - protein, 163 aa, Homo sapiens
MASMTGGQQMGRDPNSAHVQLVESGGGLVQAGGSLRLSCAASELTFSNYAMGWFRRAPGKERGFVAAISYSGGSTDYADSVKGRFTISRDNAKKTVYLQMNSLKPEDTAVYYCAAAYMGWGTARSAYEYWGQGTQVTVSSEPKTPKGGCGGGAAALEHHHHHH

SEQ ID NO: 137 - protein, 168 aa, Homo sapiens
MASMTGGQQMGRDPNSAQVQLVESGGGLVQAGVSLRLSCAASERTFSSYIMGWFRQAPGKEREFIAAISWSGGNTDYAGSVQGRFTISRDNAQNTVYLQMNSLEPEDTAVYYCAADATHSWSYGSRWYDRNYNYWGQGTQVTVSSEPKTPKGGCGGGAAALEHHHHHH

SEQ ID NO: 138 - protein, 166 aa, Homo sapiens
MASMTGGQQMGRDPNSAEVQLVESGGGLVQAGASLRLSCAASGGTFSSYIMGWFRQAPGKEREFVAAISWSGRSTHYADSVKGRFAISRDNDRVYLQMNSLKPEDTAVYSCAADPNYTWRDDRYYREEGYTYWGQGTQVTVSSEPKTPKGGCGGGAAALEHHHHHH

SEQ ID NO: 139 - protein, 162 aa, Homo sapiens
MASMTGGQQMGRDPNSAQVQLVESGGGLVQAGGSLRLSCAASGLTFSNYAMGWFRQAPGKEREFVVAISRGGNTYYADSVKDRFTISRDNAKNTVYLQMNSLKPEDTAVYYCGADYAGLGDSRAHEYDYWGQGPRSPSSEPKTPKGGCGGGAAALEHHHHHH

SEQ ID NO: 140 - protein, 164 aa, Homo sapiens
MASMTGGQQMGRDPNSAHVQLVESGGGLVQAGGSLRLSCAASGLTFSNYAMGWFRQAPGKEREFVVAISWSGANTYYSDSVKGRFTASRDNAKKTVYLQMNSLKPEDTAVYYCAADYRGLGYSTAHEYDYWGQGTQVTVSSEPKTPKGGCGGGAAALEHHHHHH

SEQ ID NO: 141 - protein, 163 aa, Homo sapiens
MASMTGGQQMGRDPNSAHVQLVESGGGLVQAGGSLRLSCAASGLTFSNYALGWFRRAPGKERDFVAAISYSGGSTDYADSVKGRFTISRDNAKNTVYLQMNSLKPEDTAVYYCAAEYLGWGTARTAYEYWGQGTQVTVSSEPKTPKGGCGGGAAALEHHHHHH

SEQ ID NO: 142 - protein, 163 aa, Homo sapiens
MASMTGGQQMGRDPNSAEVQLVESGGGLAQAGGSLRLSCAASGGTFSNSCMGWFRQAPGMEREFVAIIRSTGHTTYADSVEGRFTVSRDIAKNTVYLEMNSLKPEDTAVYSCAAGASDYGCYHTSGISYWGQGTQVTVSSEPKTPKGGCGGGAAALEHHHHHH

SEQ ID NO: 143 - protein, 160 aa, Homo sapiens
MASMTGGQQMGRNSADVQLVESGGGLVQPGGSLRLSCAASGFTLDDYAIGWFRQAPGKEREGVSCISSHGSTYYADSVKGRFTISRDNVKNTLYLQMNSLKPEDTALYYCAASYYSDYEVAVCRSDALDAWGQGTQVTVSEPKTPKGGCGGGLEHHHHHH

SEQ ID NO: 144 - protein, 162 aa, Homo sapiens
MASMTGGQQMGRNSADVQLVESGGGLVQAGGSLRLSCAASGHTFSSYTMGWFHQAPGKEREFVAEISGTGGNTGYADSVKGRFTISRDNAKNTVYLQMNSLKPEDTAVYYCAAVIGSPTDSSDYRSSLDYDYWGQGTQVTVSEPKTPKGGCGGGLEHHHHHH

SEQ ID NO: 145 - protein, 162 aa, Homo sapiens
MASMTGGQQMGRNSADVQLVESGGGLVQAGGSLRLSCAASGRTFSSYTMGWFHQAPGKEREFVAEIGGTGGNTGYADSVKGRFTISRDNAKNTVYLQMNSLKPEDTAVYYCAAVIGSPTDSSDYRSSLDYDYWGQGTQVTVSEPKTPKGGCGGGLEHHHHHH

SEQ ID NO: 146 - protein, 160 aa, Homo sapiens
MASMTGGQQMGRNSAHVQLVESGGGLVQAGGSLRLSCAAAGRTSSDYAMGWFRQAPGKEREFVSAINWSGISTYYADSVKGRFTISRDNAKNTVHLQMNSLKPEDTAVYYCAAEKLESLRNWHDPLMYDYWGQGTQVTVSEPKTPKGGCGGGLEHHHHHH

SEQ ID NO: 147 - protein, 160 aa, Homo sapiens
MASMTGGQQMGRNSADVQLVESGGGLVQAGDSLRLSCAASGITFRWYTMAWFRQAPGKERDFVATINWSGSDTNYADSVKGRFTISRDNAKNTVTLQMNSLQPEDTAVYYCAGVPGTSLSGETDPRDYDYWGQGTQVTVSEPKTPKGGCGGGLEHHHHHH

SEQ ID NO: 148 - protein, 162 aa, Homo sapiens
MASMTGGQQMGRNSAHVQLVESGGGLVQAGGSLRLSCAASGRTFSRYTMGWFHQAPGKEREFVAEISGTGGNTGYADSVKGRFTMSRDNAKNTVYLQMNSLKPEDTGVYYCAAVIGSPTDSSDYRSSLDYDYWGQGTQVTVSEPKTPKGGCGGGLEHHHHHH

SEQ ID NO: 149 - protein, 159 aa, Homo sapiens
MASMTGGQQMGRNSADVQLVESGGGLVKPGESLKLSCVASGETLSSYIMGWFRQAPGKEREFVAAVSWSGNQQDYADSVKGRFTISRDNAKNTVYLQMNSLKPEDTAVYYCANGPCTGPRAIAEVLYESWGQGTQVTVSEPKTPKGGCGGGLEHHHHHH

SEQ ID NO: 150 - protein, 162 aa, Homo sapiens
MASMTGGQQMGRNSAEVQLVESGGGLVQPGGSLRLSCKASGFDFEYYTIGWFRQAPGKEREGVSCINRGDGATYYRDSVKGRFTISRDNAKKTMYLEMNNLKPEDTAVYYCATADSGWGCYGHRIQKNEFDHFGQGTQVTVSEPKTPKGGCGGGLEHHHHHH

SEQ ID NO: 151 - protein, 166 aa, Homo sapiens
MASMTGGQQMGRNSADVQLVESGGGLVQAGGSLRLSCVASVASGRTFGWYDMGWFRQAPGKEREFVAAISWSGGSTYYADSVKGRSTISRDNAKNTVYLQMNSLKPEDTAVYYCAARGGGTSVDSDYDVGEFEYDYWGQGTQVTVSEPKTPKGGCGGGLEHHHHHH

SEQ ID NO: 152 - protein, 160 aa, Homo sapiens
MASMTGGQQMGRNSADVQLVESGGGLVQAGGSLRLSCTASGRTFSTYTMAWFRQAPGKEREFVAAITWSGTYYADSVKGRFTISRDNAKNTMYLQMNSLKPEDTAVYICAAVIGSTVDSYSPSDPLEYDYWGQGTQVTVSEPKTPKGGCGGGLEHHHHHH

SEQ ID NO: 153 - protein, 162 aa, Homo sapiens
MASMTGGQQMGRNSADVQLVESGGGLVQAGGSLRLSCVASGRTFSTYTMGWFRQAPGKEREFVAHIGWSGSSTYYADSVKGRFTISRDNAKNTMYLQMNSLKPEDTAVYYCAVAIGSPVDSYRHSDPLEYDYWGQGTQVTVSEPKTPKGGCGGGLEHHHHHH

SEQ ID NO: 154 - protein, 159 aa, Homo sapiens
MASMTGGQQMGRNSAQVQLVESGGGLVQAGGSLRLSCTASGRTFSTYTMAWFRQAPGKEREFVAAISWSGAYYAESVKGRFTISRDNAKNTVYLQMNSLKPEDTAVYYCAAVIGSTVDSYSPSDPLEYDYWARGPRSPSEPKTPKGGCGGGLEHHHHHH

SEQ ID NO: 155 - protein, 162 aa, Homo sapiens
MASMTGGQQMGRNSAQVQLVESGGGLVQAGGSLRLSCAASGRTFSTYTMGWFRQAPGKEREFVAAVTWSETLYSDSVKGRFTISRDNAKNTVYLQMNSLKPEDTAVYYCAAVQGSPVDTIVVLTTSEEYDYWGQGTQVTVSSEPKTPKGGCGGGLEHHHHHH

SEQ ID NO: 156 - protein, 161 aa, Homo sapiens
MASMTGGQQMGRNSAQVQLVESGGGLVQAGDSLRLSCTASGRTFSTYTMAWFRQAPGKEREFVAAISWSGTYYADSVKGRFTISRDNAKNTVYLQMNSLKPEDTAVYYCAAVIGSTVDTYSPSDPLEYDYWGQGTQVTVSSEPKTPKGGCGGGLEHHHHHH

SEQ ID NO: 157 - protein, 164 aa, Homo sapiens
MASMTGGQQMGRNSAQVQLVESGGGLVQAGGSLRLSCVASGRPFSSLDMGWFRQRPGKERDVVATINWTGDSTYYLDSVKGRFTISRDNAKNTVFLQMNSLKPEDTAVYYCAARGGGSSVDSEYDVGEFEYDYWGQGTQVTVSSEPKTPKGGCGGGLEHHHHHH

SEQ ID NO: 158 - protein, 129 aa, Homo sapiens
MAQVQLVESGVGLVQAGGSLRLSCAASGRTFSSYTMGWFHQAPGKEREFVAEISGTGGNTGYADSVKGRFTISRDNAKNTVYLQMNSLKPEDTAAYYCAAVIGSPTDSSDYRSSLDYDYWGQGTQVTVS

SEQ ID NO: 159 - protein, 130 aa, Homo sapiens
MAQVQLVESGRGLVQAGGSLRLSCAASGRPFSSLDMGWFRQRPGKERDVVATINWTGDSTYYLDSVKGRFTISRDNAKNTVFLQMNSLKPEDTAVYYCAARGGGSSVDSEYDVGEFEYDYWGQGTQVTVS

SEQ ID NO: 160 - protein, 118 aa, Homo sapiens
MAQVQLVESGGSLTLSCTASKFTLDYYAIGWFRQAPGKEREWVSCISSSYSRTTYVDSVKGRFTISRDKAKNMVYLQMRSLKPEDTAVYYCATRTLDGLECGGSHYDYYGQGTQVTVS

SEQ ID NO: 161 - protein, 129 aa, Homo sapiens
MAQVQLVESGGRLVQAGGSLRLSCAASGRTFTHLNMGWFRQAPGKEREFTAHINWSGGSTNYADSVKGRFTISRDNAKNTVYLQMNSLKPEDTAVYYCAATLGDSVDLDSDADPRGYDYWGQGTQVTVS

SEQ ID NO: 162 - protein, 129 aa, Homo sapiens
MAQVQLVESGGRLVQAGGSLRLSCAASGRTFAHLNMGWFRQAPGKEREFTAHINWSGGSTNYADSVKGRFTISRDNAKNTVYLQMNSLKPEDTAVYYCAATLGDSVDLDSDADPRGYDYWGQGTQVTVS

SEQ ID NO: 163 - protein, 130 aa, Homo sapiens
MAQVQLVESGGRLVQAGGSLRLSCAASGRPFSSLDMGWFRQRPGKERDVVATINWTGDSTYYLDSVKGRFTISRDNAKNTVFLQMNSLKPEDTAVYYCAARGGGSSVDSEYDVGEFEYDYWGQGTQVTVS

SEQ ID NO: 164 - protein, 129 aa, Homo sapiens
MAQVQLVESGGRLVQAGDSLKLSCAASGRTFSTYTMGWFRQAPGKEREFVAGTSPSGDNRYYGDSVKGRFSISRDNARNTVYLQMNSLKPEDTAVYFCAAFRGSCVDDGCDFRVSQYDYWGQGTQVTVS

SEQ ID NO: 165 - protein, 129 aa, Homo sapiens
MAQVQLVESGGRLVQAGDSLKLSCAASGRTFSTYTMGWFRQAPGKEREFVAGTSPSGDNRNYGDSVKGRFSISRDNARNTMYLQMNSLKPEDTAVYFCAAFRGSCVDYGCDFRVSQYDYWGQGTQVTVS

SEQ ID NO: 166 - protein, 126 aa, Homo sapiens
MAQVQLVESGGKLVQAGGSLRLSCAVSGVSFRNMGWFRQAPGKEREFVAAISWSGDSTVYADSVKGRVTISRDNAKNTVHLEMNSLKPEDTAVYYCAADGRFRAGRIGTSLGLYHYWGQGTQVTVS

SEQ ID NO: 167 - protein, 130 aa, Homo sapiens
MAQVQLVESGGGVVQAGGSLRLSCAASGRPFSSLDMGWFRQRPGKERDVVATINWTGDSTYYLDSVKGRFTISRDNAKNTVFLQMNSLKPEDTAVYYCAARGGGSSVDSEYDVGEFEYDYWGQGTQVTVS

SEQ ID NO: 168 - protein, 127 aa, Homo sapiens
MAQVQLVESGGGSVQAGGSLRLSCTASGRTFSTYTMAWFRQAPGKEREFVAAISWSGTYYADSVKGRFTISRDNAKNTVYLQMNSLKPEDTAVYYCAAVIGSTVDSYSPSDPLEYDYWGQGTQVTVS

SEQ ID NO: 169 - protein, 127 aa, Homo sapiens
MAQVQLVESGGGSVQAGGSLRLSCTASGRTFSTYTMAWFRQAPGKEREFVAAISWSGAYYAESVKGRFTISRDNAKNTVYLQMNSLKPEDTAVYYCAAVIGSTVDSYSPSDPLEYDYWGQGTQVTVS

SEQ ID NO: 170 - protein, 127 aa, Homo sapiens
MAQVQLVESGGGSVQAGGSLRLSCTASGRTFSTYTMAWFRQAPGKEREFVAAISWSGAYYADSVTGRFTISRDNTKNTVYLQMNSLKPEDTAVYYCAAVIGSTVDSYRPGDPLEYDYWGQGTQVTVS

SEQ ID NO: 171 - protein, 127 aa, Homo sapiens
MAQVQLVESGGGSVQAGGSLRLSCTASGRTFSTYTMAWFRQAPGKEREFVAAISWSGAYYADSVTGRFTISRDNAKNTVYLQMNSLKPEDTVVYYCAAVIGSTVDSYRPGDPLEYDYWGQGTQVTVS

SEQ ID NO: 172 - protein, 127 aa, Homo sapiens
MAQVQLVESGGGSVQAGGSLRLSCTASGRTFSTYTMAWFRQAPGKEREFVAAISWSGAYYADSVTGRFTISRDNAKNTVYLQMNSLKPEDTAVYYCAAVIGSTVDSYWPGDPLEYDYWGQGTQVTVS

SEQ ID NO: 173 - protein, 127 aa, Homo sapiens
MAQVQLVESGGGSVQAGGSLRLSCTASGRTFSTYTMAWFRQAPGKEREFVAAISWSGAYYADSVTGRFTISRDNAKNTVYLQMNSLKPEDTAVYYCAAVIGSTVDSYRPGDPLEYDYWGQGTQVTVS

SEQ ID NO: 174 - protein, 126 aa, Homo sapiens
MAQVQLVESGGGSVQAGGSLRLSCTASGRTFSTYTMAWFRQAPGKEREFVAAISWSGAYYADSVTGRFTISRDNAKNTVYLQMNSLKPEDTAVYYCAAVIGSTVDSYRPGDPLEYDYWGQGPRSPS

SEQ ID NO: 175 - protein, 127 aa, Homo sapiens
MAQVQLVESGGGSVQAGGSLRLSCTASGRTFSTYTMAWFRQAPGKEREFVAAISWSGAYYADSVTGRFTISRDNAKNTVYLQMNSLKPEDTAVYYCAAVIGSTVDSYRPGDPLEYDYGGQGTQVTVS

SEQ ID NO: 176 - protein, 127 aa, Homo sapiens
MAQVQLVESGGGSVQAGGSLRLSCTASGRTFSTYTMAWFRQAPGKEREFVAAISWSGAYYADSVTGRFTISRDNAKNTVYLQMNSLKPEDTAVYYCAAVIGSTVDSYRPGDPLEYDDWGQGTQVTVS

SEQ ID NO: 177 - protein, 127 aa, Homo sapiens
MAQVQLVESGGGSVQAGGSLRLSCTASGRTFSTYTMAWFRQAPGKEREFVAAISWSGAYYADSVTGRFTISRDNAKNTVYLQMNILKPEDTAVYYCAAVIGSTVDSYRPGDPLEYDYWGQGTQVTVS

SEQ ID NO: 178 - protein, 127 aa, Homo sapiens
MAQVQLVESGGGSVQAGGSLRLSCTASGRTFSTYTMAWFRQAPGKEREFVAAISWSGAYYADSVTGRFTISRDNAKNTMYLQMNSLKPEDTAVYYCAAVIGSTVDSYRPGDPLEYDYWGQGTQVTVS

SEQ ID NO: 179 - protein, 127 aa, Homo sapiens
MAQVQLVESGGGSVQAGGSLRLSCTASGRTFSTYTMAWFHQAPGKEREFVAAISWSGAYYADSVTGRFTISRDNAKNTVYLQMNSLKPEDTAVYYCAAVIGSTVDSYRPGDPLEYDYWGQGTQVTVS

SEQ ID NO: 180 - protein, 132 aa, Homo sapiens
MAQVQLVESGGGSVQAGGSLRLSCAASGRTFSSLRMAWFRQAPGKEREFVAENWWNGQGGQGVWYVDSVKGRFTISRDNAKNTLYLQMNNLKPEDTAVYYCAAHRDDSGSTVDPPNQSDYDYWGQGTQVTVS

SEQ ID NO: 181 - protein, 130 aa, Homo sapiens
MAQVQLVESGGGSVQAGGSLRLSCAASGRPFSSLDMGWFRQRPGKERDVVATINWTGDSTYYLDSVKGRFTISRDNAKNTVFLQMNSLKPEDTAVYYCAARGGGSSVDSEYDVGEFEYDYWGQGTQVTVS

SEQ ID NO: 182 - protein, 130 aa, Homo sapiens
MAQVQLVESGGGSVQAGGSLRLSCAASGRPFSSLDMGWFRQAPGKEREFVATISWTGGSTYYADSVKGRFTISRDNAKNTVYLQMNSLKPEDTAVYYCAARGGGTSVDSDYDVEEFEYDYWGQGTQVTVS

SEQ ID NO: 183 - protein, 127 aa, Homo sapiens
MAQVQLVESGGGSMQAGGSLRLSCTASGRTFSTYTMAWFRQAPGKEREFVAAISWSGAYYADSVTGRFTISRDNAKNTVYLQMNSLKPEDTAVYYCAAVIGSTVDSYRPGDPLEYDYWGQGTQVTVS

SEQ ID NO: 184 - protein, 128 aa, Homo sapiens
MAQVQLVESGGGPVQAGGSLRLSCAASGRTFSTYVMAWFRQAPGKEREFVAAISWNGSTYYADSVKGRFTISRDNAKNTVYLQMNSLSPEDTAVYYCAAAIGSTVDSYSPSDPLEYDYWGQGTQVTVS

SEQ ID NO: 185 - protein, 128 aa, Homo sapiens
MAQVQLVESGGGPVQAGGSLRLSCAASGRTFSTYVMAWFRQAPGKEREFVAAISWNGSTYYADSVKGRFTISRDNAKNTVYLQMNSLSPEDTAVYYCAAAIGSTVDSYSPSDPLEYDDWGQGTQVTVS

SEQ ID NO: 186 - protein, 129 aa, Homo sapiens
MAQVQLVESGGGPVQAGGSLRLSCAASGRTFSTYVMAWFRQAPGKEREFVAAISWNGGSTYYADSVKGRFTISRDNTKNTVYLQMNSLSPEDTAVYYCAAAIGSTVDSYSPSDPLEYDYWGQGTQVTVS

SEQ ID NO: 187 - protein, 130 aa, Homo sapiens
MAQVQLVESGGGLVRAGGSLRLSCAASGRPFSSLDMGWFRQAPGKEREFVATISWTGGSTYYADSVKGRFTISRDNAKNTVYLQMNSLKPEDTAVYYCAARGGGTSVDSDYDVEEFEYDYWGQGTQVTVS

SEQ ID NO: 188 - protein, 127 aa, Homo sapiens
MAQVQLVESGGGLVQTGGSLRLSCTASGRTFSTYTMAWFRQAPGKEREFVAAISWSGTYYADSVKGRFTISRDNAKNTVYLQMNSLKPEDTAVYYCAAVIGSTVDSYSPSDPLEYDYWGQGTQVTVS

SEQ ID NO: 189 - protein, 127 aa, Homo sapiens
MAQVQLVESGGGLVQTGGSLRLSCTASGRTFSTYTMAWFRQAPGKEREFVAAISWSGAYYAESVKGRFTISRDNAKNTVYLQMNSLKPEDTAVYYCAAVIGSTVDSYSPSDPLEYDYWGQGTQVTVS

SEQ ID NO: 190 - protein, 127 aa, Homo sapiens
MAQVQLVESGGGLVQTGGSLRLSCTASGRTFSTYTMAWFRQAPGKERDFVAAISWSGAYYADSVKGRFTISRDNAKNTVYLQMNSLKPEDTAVYVCAAVIGSTVDSYSPGDPLEYDYWGQGTQVTVS

SEQ ID NO: 191 - protein, 126 aa, Homo sapiens
MAQVQLVESGGGLVQTGGSLRLSCAASTRTFSDYTMGWFRRAPGKEREFVATISTGGGSRKYGDSVVGRFTISRDNAKNMVYLQMNSLKPEDTAVYYCAASHRGYYSGSYSREYDFWGQGTQVTVS

SEQ ID NO: 192 - protein, 126 aa, Homo sapiens
MAQVQLVESGGGLVQTGGSLRLSCAASTRTFSDYTMGWFRRAPGKEREFVATISTGGGSRKYADSVTGRFTISRDNAKNMVYLQMNSLKPEDTAVYYCAASLRGYYSGSYSREYDLWGQGTQVTVS

SEQ ID NO: 193 - protein, 129 aa, Homo sapiens
MAQVQLVESGGGLVQTGGSLRLSCAASGRTFSTYTMAWFRQAPGKEREFVADINWNGGSTYYADSVKGRFTISRDNAKNTVYLQMNSLKPEDTAVYYCAAAIGSTVDSYYHSDPLEYDYWGQGTQVTVS

SEQ ID NO: 194 - protein, 130 aa, Homo sapiens
MAQVQLVESGGGLVQTGGSLRLSCAASGRPFSSLDMGWFRQRPGKERDVVATINWTGDSTYYLDSVKGRFTISRDNAKNTVFLQMNSLKPEDTAVYYCAARGGGSSVDSEYDVGEFEYDYWGQGTQVTVS

SEQ ID NO: 195 - protein, 126 aa, Homo sapiens
MAQVQLVESGGGLVQTGDSLRLSCAASTRTFSDYTMGWFRRAPGKEREFVATISTGGGSRKYGDSVVGRFTISRDNAKNMVYLHMNSLKPEDTAVYYCAASLRGYYSGSYSREYDLWGQGTQVTVS

SEQ ID NO: 196 - protein, 125 aa, Homo sapiens
MAQVQLVESGGGLVQSGGSLRLSCTASGFTLDYYAIGWFRQAPGKEREGVSCISSSYGVTTYADPVKGRFTISRDKAKNMVYLQMDSLKPEDTAVYYCATRTLDGLECGGSHYDYFGQGTQVTVS

SEQ ID NO: 197 - protein, 125 aa, Homo sapiens
MAQVQLVESGGGLVQSGGSLRLSCTASGFTLDYYAIGWFRQAPGKEREGVSCISSSYGRTTYADSVKGRFTISRDKSKNMIYLQMNSLKPEDTAVYYCATRTLDGLECGGSHYDYVGQGTQVTVS

SEQ ID NO: 198 - protein, 125 aa, Homo sapiens
MAQVQLVESGGGLVQSGGSLRLSCTASGFTLDYYAIGWFRQAPGKEREGVSCISSSYGRTTYADSVKGRFTISRDKSKNMIYLQMNSLKPEDTAVYYCATRTLDGLECGGSHYDYFGQGTQVTVS

SEQ ID NO: 199 - protein, 125 aa, Homo sapiens
MAQVQLVESGGGLVQSGGSLRLSCTASGFTLDYYAIGWFRQAPGKEREGVSCISSSYGRTTYADSVKGRFTISRDKSKNMIYLQMNSLKPEDTAVYYCATRTLDGLECGGSHYDYCGQGTQVTVS

SEQ ID NO: 200 - protein, 130 aa, Homo sapiens
MAQVQLVESGGGLVQSGGSLRLSCAASGRPFNMYDMGWFRQALGKEREFVATVSWTGSSTNYADSVKGRFTISRDNAKNTVYLEMNSLKPEDTAVYYCAARGGGTSVDSDYDVGEFEYDYWGQGTQVTVS

SEQ ID NO: 201 - protein, 127 aa, Homo sapiens
MAQVQLVESGGGLVQPGGSVRVSCVSSGFILDYYAIGWFRQAPGKEREGVSCIDSVGRAYYVDSVKGRFTISRDNVKNTVYLQMNSLKPEDTAVYYCAADFGSSVDSTCLNNQQYDYWGQGTQVTVS

SEQ ID NO: 202 - protein, 127 aa, Homo sapiens
MAQVQLVESGGGLVQPGGSVRVSCVSSGFILDYYAIGWFRQAPGKEREGVSCIDSVGRAYYVDSVKGRFTISRDNAKNTVYLQMNSPKPEDTAVYYCAADFGSSVDSTCLNNQQYDYWGQGTQVTVS

SEQ ID NO: 203 - protein, 127 aa, Homo sapiens
MAQVQLVESGGGLVQPGGSVRVSCVSSGFILDYYAIGWFRQAPGKEREGVSCIDSVGRAYYVDSVKGRFTISRDNAKNTVYLQMNSMKPEDTAVYYCAADFGSSVDSTCLNNQQYDYWGQGTQVTVS

SEQ ID NO: 204 - protein, 127 aa, Homo sapiens
MAQVQLVESGGGLVQPGGSVRVSCVSSGFILDYYAIGWFRQAPGKEREGVSCIDSVGRAYYVDSVKGRFTISRDNAKNTVYLQMNSLKPEDTAVYYCAADFGSSVDSTCLNNRQYDYWGQGTQVTVS

SEQ ID NO: 205 - protein, 127 aa, Homo sapiens
MAQVQLVESGGGLVQPGGSVRVSCVSSGFILDYYAIGWFRQAPGKEREGVSCIDSVGRAYYVDSVKGRFTISRDNAKNTVYLQMNSLKPEDTAVYYCAADFGSSVDSTCLNNQQYGYWGQGTQVTVS

SEQ ID NO: 206 - protein, 127 aa, Homo sapiens
MAQVQLVESGGGLVQPGGSVRVSCVSSGFILDYYAIGWFRQAPGKEREGVSCIDSVGRAYYVDSVKGRFTISRDNAKNTVYLQMNSLKPEDTAVYYCAADFGSSVDSTCLNNQQYDYWGQGTQVTVS

SEQ ID NO: 207 - protein, 127 aa, Homo sapiens
MAQVQLVESGGGLVQPGGSVRVSCVSSGFILDYYAIGWFRQAPGKEREGVSCIDSVGRAYYVDSVKGRFTISRDNAKNTVYLQMNNLKPEDTAVYYCAADFGSSVDSTCLNNQQYDYWGQGTQVTVS

SEQ ID NO: 208 - protein, 127 aa, Homo sapiens
MAQVQLVESGGGLVQPGGSVRVSCVSSGFILDYYAIGWFRQAPGKEREGVSCIDSVGRAYYVDSVKGRFTISRDNAKNTVYLQMNGLKPEDTAVYYCAADFGSSVDSTCLNNQQYDYWGQGTQVTVS

SEQ ID NO: 209 - protein, 127 aa, Homo sapiens
MAQVQLVESGGGLVQPGGSVRVSCVSSGFILDYYAIGWFRQAPGKEREGVSCIDSVGRAYYVDSVKGRFTISRDNAKNMVYLQMNSLKPEDTAVYYCAADFGSSVDSTCLNNQQYDYWGQGTQVTVS

SEQ ID NO: 210 - protein, 127 aa, Homo sapiens
MAQVQLVESGGGLVQPGGSVRVSCVSSGFILDYYAIGWFRQAPGKEREGVSCIDSVGRAYYVDSVKGRFSISRDNAKNTVYLQMNSLKPEDTAVYYCAADFGSSVDSTCLNNQQYDYWGQGTQVTVS

SEQ ID NO: 211 - protein, 127 aa, Homo sapiens
MAQVQLVESGGGLVQPGGSVRVSCVSSGFILDYYAIGWFRQAPGKEREGVSCIDSVGRAYYVDSVKGRFIISRDNAKNTVYLQMNSLKPEDTAVYYCAADFGSSVDSTCLNNQQYDYWGQGTQVTVS

SEQ ID NO: 212 - protein, 127 aa, Homo sapiens
MAQVQLVESGGGLVQPGGSVRVSCVSSGFILDYYAIGWFRQAPGKEREGVSCIDSVGRAYYVDSAKGRFTISRDNAKNTVYLQMNSLKPEDTAVYYCAADFGSSVDSTCLNNQQYDYWGQGTQVTVS

SEQ ID NO: 213 - protein, 127 aa, Homo sapiens
MAQVQLVESGGGLVQPGGSVRVSCVSSGFILDCYAIGWFRQAPGKEREGVSCIDSVGRAYYVDSVKGRFTISRDNAKNTVYLQMNSLKPEDTAVYYCAADFGSSVDSTCLNNQQYDYWGQGTQVTVS

SEQ ID NO: 214 - protein, 130 aa, Homo sapiens
MAQVQLVESGGGLVQPGGSLTLSCAASGRPFSSLDMGWFRQRPGKERDVVATINWTGDSTYYLDSVKGRFTISRDNAKNTVFLQMNSLKPEDTAVYYCAARGGGSSVDSEYDVGEFEYDYWGQGTQVTVS

SEQ ID NO: 215 - protein, 125 aa, Homo sapiens
MAQVQLVESGGGLVQPGGSLRVSCAASGFTFSSYDMNWVRQAPGKGLEWVCSIYSDGRNTWYADSVKGRFTISRDNAKNTLYLQMNSLKSEDTAVYYCVKDLKAAIELERDGMDYWGKGTQVTVS

SEQ ID NO: 216 - protein, 128 aa, Homo sapiens
MAQVQLVESGGGLVQPGGSLRLSCVSSGFIFDYYAIGWFRQAPGKEREGVSCISSVGRAYYIDSVKGRFTISRDNAKNTVYLQMNSLKPEDTAVYYCAADFGSSVDSTCLSKEQRFDYWGQGTQVTVS

SEQ ID NO: 217 - protein, 133 aa, Homo sapiens
MAQVQLVESGGGLVQPGGSLRLSCVASVASGRTFGWYDMGWFRQAPGKEREFVAAISWSGGSTYYADSVKGRSTISRDNAKNTVYLQMNSLKPEDTAVYYCAARGGGTSVDSDYDVGEFEYDYWGQGTQVTVS

SEQ ID NO: 218 - protein, 130 aa, Homo sapiens
MAQVQLVESGGGLVQPGGSLRLSCVASGRPFSSLDMGWFRQRPGKERDVVATINWTGDSTYYLDSVKGRFTISRDNAKNTVFLQMNSLKPEDTAVYYCAARGGGSSVDSEYDVGEFEYDYWGQGTQVTVS

SEQ ID NO: 219 - protein, 129 aa, Homo sapiens
MAQVQLVESGGGLVQPGGSLRLSCVASGGTFSSYAMAWFRQAPGKEREFVAEDSWSNHRVWYSDSVKGRFTISRDNAKNTVYLQMNNLKPEDTAVYYCAAYRDYSGSTVDPPNQSEYDYWGQGTQVTVS

SEQ ID NO: 220 - protein, 127 aa, Homo sapiens
MAQVQLVESGGGLVQPGGSLRLSCTASGRTFSTYTMAWFRQAPGKEREFVAAISWSGTYYADSVKGRFTISRDNAKNTVYLQMNSLKPEDTAVYYCAAVIGSTVDSYSPSDPLEYDYWGQGTQVTVS

SEQ ID NO: 221 - protein, 127 aa, Homo sapiens
MAQVQLVESGGGLVQPGGSLRLSCTASGRTFSTYTMAWFRQAPGKEREFVAAISWSGAYYAESVKGRFTISRDNAKNTVYLQMNSLKPEDTAVYYCAAVIGSTVDSYSPSDPLEYDYWGQGTQVTVS

SEQ ID NO: 222 - protein, 126 aa, Homo sapiens
MAQVQLVESGGGLVQPGGSLRLSCTASGFTLKYYAIGWFRQAPGKEREGVSCISSFSGRTFTYSDSAKGRFTISRDNDKNTVYLQMNSLKPEDTAVYYCATRPLDGLECGGSAYDYYGPGTQVTVS

SEQ ID NO: 223 - protein, 129 aa, Homo sapiens
MAQVQLVESGGGLVQPGGSLRLSCKASGFDFEYYTIGWFRQAPGKEREGVSCINRGDGTTYYRDSVKGRFTISRDNAKKTMYLEMNSLKPEDTAVYYCATADSGWGCYGHRIQKNEFDHFGQGTQVTVS

SEQ ID NO: 224 - protein, 129 aa, Homo sapiens
MAQVQLVESGGGLVQPGGSLRLSCKASGFDFEYYTIGWFRQAPGKEREGVSCINRGDGATYYRDSVKGRFTISRDNAKKTMYLEMNNLKPEDTAVYYCATADSGWGCYGHRIQKNEFDHFGQGTQVTVS

SEQ ID NO: 225 - protein, 124 aa, Homo sapiens
MAQVQLVESGGGLVQPGGSLRLSCAASGSIGSINIMGWYRQAPGKQRELVASITSGGATNYADSVKGRFTISRDNAKNTVYLQMNSLKPEDTAVYYCNLDRGTHLGDSFERDDYWGRGTQVTVS

SEQ ID NO: 226 - protein, 127 aa, Homo sapiens
MAQVQLVESGGGLVQPGGSLRLSCAASGRTFSTYTMAWFRQAPGKEREFVAAISWSGAYYAESVKGRFTISRDNAKNTVYLQMNSLKPEDTAVYYCAAVIGSTVDSYSPSDPLEYDYWGQGTQVTVS

SEQ ID NO: 227 - protein, 130 aa, Homo sapiens
MAQVQLVESGGGLVQPGGSLRLSCAASGRPFSSLDMGWFRQRPGKERDVVATINWTGDSTYYLDSVKGRFTISRDNAKNTVFLQMNSLKPEDTAVYYCAARGGGSSVDSEYDVGEFEYDYWGQGTQVTVS

SEQ ID NO: 228 - protein, 130 aa, Homo sapiens
MAQVQLVESGGGLVQPGGSLRLSCAASGRPFSSLDMGWFRQAPGKEREFVATISWTGGSTYYADSVKGRFTISRDNAKNTVYLQMNSLKPEDTAVYYCAARGGGTSVDSDYDVEEFEYDYWGQGTQVTVS

SEQ ID NO: 229 - protein, 132 aa, Homo sapiens
MAQVQLVESGGGLVQPGGSLRLSCAASGFTSDYYVISWFRQAPGKEREGVSCISSSDTYYADSVKGRFTISRDNAKNTVYLQMNSLKPEDTAVYYCATAAIWDPSGLAVCGSSWYRRGWWDYWGQGTQVTVS

SEQ ID NO: 230 - protein, 127 aa, Homo sapiens
MAQVQLVESGGGLVQPGGSLRLSCAASGFTLDYYIIAWFRQAPGKEREGVSCIHSSDGSTYYADSVKGRFTISRDNAKNTVYLQMNSLKPEDTAVYYCATHEEMDSDLCHHISEYDYWGQGTQVTVS

SEQ ID NO: 231 - protein, 130 aa, Homo sapiens
MAQVQLVESGGGLVQPGGSLRLSCAASGFTLDYYAIGWFRQAPGKEREGVSCISSSDGSTYYADSVKGRFTISRDNAKNTVFLQMNSLKPEDTAVYYCAARGGGSSVDSEYDVGEFEYDYWGQGTQVTVS

SEQ ID NO: 232 - protein, 129 aa, Homo sapiens
MAQVQLVESGGGLVQPGGSLRLSCAASGFTLDYYAIGWFRQAPGKEREGVSCISSSDGSTYYADSVKGRFTISRDNAKNTMYLQMNNLKPEDTAVYICAAVIGSTVDSYSPSDPLEYDYWGQGTQVTVS

SEQ ID NO: 233 - protein, 127 aa, Homo sapiens
MAQVQLVESGGGLVQPGGSLRLSCAASGFTLDYYAIGWFRQAPGKEREGVSCIDSVGRAYYVDSVKGRFTISRDNAKNTVYLQMNSLKPEDTAVYYCAADFGSSVDSTCLNNQQYDYWGQGTQVTVS

SEQ ID NO: 234 - protein, 127 aa, Homo sapiens
MAQVQLVESGGGLVQPGGSLRLSCAASGFTLDDYAIGWFRQAPGKEREGVSCISSHGSTYYADSVKGRFTISRDNVKNTLYLQMNSLKPEDTALYYCAASYYSDYEVAVCRSDALDAWGQGTQVTVS

SEQ ID NO: 235 - protein, 123 aa, Homo sapiens
MAQVQLVESGGGLVQPGGSLRLSCAASGFTFSTYAMGWVRQAPGKGPEWVATIYSKGDTTHYANSAKGRFTISRDNARNTLYLQMNSLKPEDTAVYYCAKGISDSYLRVESNYRGQGTQVTVS

SEQ ID NO: 236 - protein, 130 aa, Homo sapiens
MAQVQLVESGGGLVQPGGSLRLSCAASGFTFSSYVMSWVRQAPGKGREWVSGIYSDGSDTYYADSVKGRFTISRDNAKNTVFLQMNSLKPEDTAVYYCAARGGGSSVDSEYDVGEFEYDYWGQGTQVTVS

SEQ ID NO: 237 - protein, 127 aa, Homo sapiens
MAQVQLVESGGGLVQPGASLRLSCTASGRTFSTYTMAWFRQAPGKEREFVAAISWSGTYYADSVKGRFTISRDNAKNTVYLQMNSLKPEDTAVYYCAAVIGSTVDSYSPSDPLEYDYWGQGTQVTVS

SEQ ID NO: 238 - protein, 127 aa, Homo sapiens
MAQVQLVESGGGLVQAWGSLRLSCTASGRTFSTYTMAWFRQAPGKEREFVAAISWSGTYYADSVKGRFTISRDNAKNTVYLQMNSLKPEDTAVYYCAAVIGSTVDSYSPSDPLEYDYWGQGTQVTVS

SEQ ID NO: 239 - protein, 130 aa, Homo sapiens
MAQVQLVESGGGLVQAWGSLRLSCAASGRPFSSLDMGWFRQRPGKERDVVATINWTGDSTYYLDSVKGRFTISRDNAKNTVFLQMNSLKPEDTAVYYCAARGGGSSVDSEYDVGEFEYDYWGQGTQVTVS

SEQ ID NO: 240 - protein, 130 aa, Homo sapiens
MAQVQLVESGGGLVQAWGSLRLSCAASGRPFNMYDMGWFRQALGKEREFVATVSWTGSSTNYADSVKGRFTISRDNAKNTVYLEMNSLKPEDTAVYYCAARGGGTSVDSDYDVGEFEYDYWGQGTQVTVS

SEQ ID NO: 241 - protein, 127 aa, Homo sapiens
MAQVQLVESGGGLVQARGSLRLSCTASGRTFSTYTMAWFRQAPGKERDFVAAISWSGVYYADSVKGRFTISRDNVKNTMYLQMNNLKPEDTAVYYCAAVIGSTVDSYSPSDPLEYDYWGQGTQVTVS

SEQ ID NO: 242 - protein, 127 aa, Homo sapiens
MAQVQLVESGGGLVQAGVSLRLSCTASGRTFSTYTMAWFRQAPGKEREFVAAISWSGTYYADSVKGRFTISRDNAKNTVYLQMNSLKPEDTAVYYCAAVIGSTVDSYSPSDPLEYDYWGQGTQVTVS

SEQ ID NO: 243 - protein, 129 aa, Homo sapiens
MAQVQLVESGGGLVQAGVSLRLSCAASGGTFSSYAMAWFRQAPGKEREFVAEDSWSNHRVWYSDSVKGRFTISRDNAKNTVYLQMNNLKPEDTAVYYCAAYRDYSGSTVDPPNQSEYDYWGQGTQVTVS

SEQ ID NO: 244 - protein, 127 aa, Homo sapiens
MAQVQLVESGGGLVQAGGSPRLSCTASGRTFSTYTMAWFRQAPGKEREFVAAISWSGAYYAESVKGRFTISRDNAKNTVYLQMNSLKPEDTAVYYCAAVIGSTVDSYSPSDPLEYDYWGQGTQVTVS

SEQ ID NO: 245 - protein, 127 aa, Homo sapiens
MAQVQLVESGGGLVQAGGSPRLSCTASGRTFSTYTMAWFRQAPGKERDFVAAISWSGVYYADSVKGRFTISRDNAKNTVYLQMNSLKPEDTAVYYCAAVIGSTVDSYSPSDPLEYDYWGQGTQVTVS

SEQ ID NO: 246 - protein, 130 aa, Homo sapiens
MAQVQLVESGGGLVQAGGSPRLSCAASGRPFSSLDMGWFRQRPGKERDVVATINWTGDSTYYLDSVKGRFTISRDNAKNTVFLQMNSLKPEDTAVYYCAARGGGSSVDSEYDVGEFEYDYWGQGTQVTVS

SEQ ID NO: 247 - protein, 130 aa, Homo sapiens
MAQVQLVESGGGLVQAGGSLSLSCAASGRPFSSLDMGWFRQRPGKERDVVATINWTGDSTYYLDSVKGRFTISRDNAKNTVFLQMNSLKPEDTAVYYCAARGGGSSVDSEYDVGEFEYDYWGQGTQVTVS

SEQ ID NO: 248 - protein, 130 aa, Homo sapiens
MAQVQLVESGGGLVQAGGSLRLSSAASGRPFSSLDMGWFRQRPGKERDVVATINWTGDSTYYLDSVKGRFTISRDNAKNTVFLQMNSLKPEDTAVYYCAARGGGSSVDSEYDVGEFEYDYWGQGTQVTVS

SEQ ID NO: 249 - protein, 130 aa, Homo sapiens
MAQVQLVESGGGLVQAGGSLRLSFAASGRPFSSLDMGWFRQRPGKERDVVATINWTGDSTYYLDSVKGRFTISRDNAKNTVFLQMNSLKPEDTAVYYCAARGGGSSVDSEYDVGEFEYDYWGQGTQVTVS

SEQ ID NO: 250 - protein, 133 aa, Homo sapiens
MAQVQLVESGGGLVQAGGSLRLSCVASVASGRTFGWYDMGWFRQAPGKEREFVATISWSGGSTYYADSVKGRSTISRDNAKNTVYLQMNSLKPEDTAVYYCAARGGGTSVDSDYDVGEFEYDYWGQGTQVTVS

SEQ ID NO: 251 - protein, 133 aa, Homo sapiens
MAQVQLVESGGGLVQAGGSLRLSCVASVASGRTFGWYDMGWFRQAPGKEREFVAAISWSGGSTYYADSVKGRSTISRDNAKNTVYLQMNSLKPEDTAVYYCAARGGGTSVDSDYDVGEFEYDYWGQGTQVTVS

SEQ ID NO: 252 - protein, 125 aa, Homo sapiens
MAQVQLVESGGGLVQAGGSLRLSCVASGSTFSINDIGWYRQAPGKQRELVAAISSGGRTNYADSVKGRFTISRDNAKNTVYLQMNSLKPEDTAVYYCNADVQNGDYTRGYRYLEVWGQGTQVTVS

SEQ ID NO: 253 - protein, 129 aa, Homo sapiens
MAQVQLVESGGGLVQAGGSLRLSCVASGRTFSTYTMGWFRQAPGKEREFVAHIGWSGSSTYYTDSVKGRFTISRDNAKNTMYLQMNSLKPEDTAVYYCAVAIGSPVDSYRHSDPLEYDYWGQGTQVTVS

SEQ ID NO: 254 - protein, 129 aa, Homo sapiens
MAQVQLVESGGGLVQAGGSLRLSCVASGRTFSTYTMGWFRQAPGKEREFVAHIGWSGSSTYYADSVKGRFTISRDNAKNTMYLQMNSLKPEDTAVYYCAVAIGSPVDSNRHSDPLEYDYWGQGTQVTVS

SEQ ID NO: 255 - protein, 127 aa, Homo sapiens
MAQVQLVESGGGLVQAGGSLRLSCVASGRTFSTYTMAWFRQAPGKEREFVAAISWSGAYYAESVKGRFTISRDNAKNTVYLQMNSLKPEDTAVYYCAAVIGSTVDSYSPSDPLEYDYWGQGTQVTVS

SEQ ID NO: 256 - protein, 127 aa, Homo sapiens
MAQVQLVESGGGLVQAGGSLRLSCVASGRTFRTYTMGWFRQAPGKEREFVAHIGWSSTDYADSVKGRFTISRDNAKNTMYLQMNSLKPEDTAVYYCAVAIGSPVDSYRHSDPLEYDYWGQGTQVTVS

SEQ ID NO: 257 - protein, 130 aa, Homo sapiens
MAQVQLVESGGGLVQAGGSLRLSCVASGRPFSSLDMGWFRQRPGKERDVVATINWTGDSTYYLDSVKGRFTISRDNAKNTVFLQMNSLKPEDTAVYYCAARGGGSSVDSEYDVGEFEYDYWGQGTQVTVS

SEQ ID NO: 258 - protein, 130 aa, Homo sapiens
MAQVQLVESGGGLVQAGGSLRLSCVASGRPFSSLDMGWFRQAPGKEREFVATISWTGGSTYYADSVKGRFTISRDNAKNTVYLQMNSLKPEDTAVYYCAARGGGTSVDSDYDVEEFEYDYWGQGTQVTVS

SEQ ID NO: 259 - protein, 130 aa, Homo sapiens
MAQVQLVESGGGLVQAGGSLRLSCVASGRPFNMYDMGWFRQALGKEREFVATVSWTGSSTNYADSVKGRFTISRDNAKNTVYLEMNSLKPEDTAVYYCAARGGGTSVDSDYDVGEFEYDYWGQGTQVTVS

SEQ ID NO: 260 - protein, 127 aa, Homo sapiens
MAQVQLVESGGGLVQAGGSLRLSCVASGGTFSSYDMGWFRQAPGKEREFVAAINWSGGSTDYPDSVKGRFTISRDNAKNTVYLQMNGLKPEDTAVYYCASRWRSGVDPYYYAGTYDYWGQGTQVTVS

SEQ ID NO: 261 - protein, 127 aa, Homo sapiens
MAQVQLVESGGGLVQAGGSLRLSCTASGRTFSTYVMAWFRQAPGKEREFVAAINWSGTYYADSVKGRFTISRDNAKNTVYLQMNSLKPEDTAVYYCAAVIGSTVDNYSPSDPLEYDYWGQGTQVTVS

SEQ ID NO: 262 - protein, 127 aa, Homo sapiens
MAQVQLVESGGGLVQAGGSLRLSCTASGRTFSTYTMVWFRQAPGKEREFVAAISWSGTYYADSVKGRFTISRDNAKNTVYLQMNSLKPEDTAVYYCAAVIGSTVDSYSPSDPLEYDYWGQGTQVTVS

SEQ ID NO: 263 - protein, 127 aa, Homo sapiens
MAQVQLVESGGGLVQAGGSLRLSCTASGRTFSTYTMTWFRQAPGKEREFVAAISWSGAYYAESVKGRFTISRDNAKNTVYLQMNSLKPEDTAVYYCAAVIGSTVDSYSPSDPLEYDYWGQGTQVTVS

SEQ ID NO: 264 - protein, 127 aa, Homo sapiens
MAQVQLVESGGGLVQAGGSLRLSCTASGRTFSTYTMGWFRQAPGKEREFVAHISWSSTYYADSVKGRFTISRDNAKNTMYLQMNSLKPEDTAVYYCAVAIGSPVDSYRHRDPLEYDYWGQGTQVTVS

SEQ ID NO: 265 - protein, 127 aa, Homo sapiens
MAQVQLVESGGGLVQAGGSLRLSCTASGRTFSTYTMAWFSQAPGKEREFVAAISWSGTYYADSVKGRFTISRDNAKNTVYLQMNSLKPEDTAVYYCAAVIGSTVDSYSPSDPLEYDYWGQGTQVTVS

SEQ ID NO: 266 - protein, 127 aa, Homo sapiens
MAQVQLVESGGGLVQAGGSLRLSCTASGRTFSTYTMAWFRRAPGKEREFVAAISWSGTYYADSVKGRFTISRDNAKNTVYLQMNSLKPEDTAVYYCAAVIGSTVDSYSPSDPLEYDYWGQGTQVTVS

SEQ ID NO: 267 - protein, 127 aa, Homo sapiens
MAQVQLVESGGGLVQAGGSLRLSCTASGRTFSTYTMAWFRQAPVKEREFVAAISWSGTYYADSVKGRFTISRDNAKNTVYLQMNSLKPEDTAVYYCAAVIGSTVDSYSPSDPLEYDYWGQGTQVTVS

SEQ ID NO: 268 - protein, 127 aa, Homo sapiens
MAQVQLVESGGGLVQAGGSLRLSCTASGRTFSTYTMAWFRQAPVKEREFVAAISWSGAYYAESVKGRFTISRDNAKNTVYLQMNSLKPEDTAVYYCAAVIGSTVDSYSPSDPLEYDYWGQGTQVTVS

SEQ ID NO: 269 - protein, 128 aa, Homo sapiens
MAQVQLVESGGGLVQAGGSLRLSCTASGRTFSTYTMAWFRQAPRKEREFVAAISWSGTYYYADSVKGRFTISRDNAKNTVYLQMNSLKPEDTAVYYCAAVIGSTVDSYSPSDPLEYDYWGQGTQVTVS

SEQ ID NO: 270 - protein, 127 aa, Homo sapiens
MAQVQLVESGGGLVQAGGSLRLSCTASGRTFSTYTMAWFRQAPGKGREFVAAISWSGAYYAESVKGRFTISRDNAKNTVYLQMNSLKPEDTAVYYCAAVIGSTVDSYSPSDPLEYDYWGQGTQVTVS

SEQ ID NO: 271 - protein, 127 aa, Homo sapiens
MAQVQLVESGGGLVQAGGSLRLSCTASGRTFSTYTMAWFRQAPGKEREFVVAITWSGTYYADSVKGRFTISRDNAKNTMYLQMNSLKPEDTAVYICAAVIGSTVDSYSPSDPLEYDYWGQGTQVTVS

SEQ ID NO: 272 - protein, 127 aa, Homo sapiens
MAQVQLVESGGGLVQAGGSLRLSCTASGRTFSTYTMAWFRQAPGKEREFVSAISWSAVYYADAVKGRFTISRDNAKNTLYLQMNSLKPEDTAVYSCGAVIGSTVDSYSPSDPLEYDYWGQGTQVTVS

SEQ ID NO: 273 - protein, 127 aa, Homo sapiens
MAQVQLVESGGGLVQAGGSLRLSCTASGRTFSTYTMAWFRQAPGKEREFVSAISWSAVYYADAVKGRFTISRDNAKNTLYLQMNSLKPEDTAVYSCAAVIGSTVDSYSPSDPLEYDYWGQGTQVTVS

SEQ ID NO: 274 - protein, 127 aa, Homo sapiens
MAQVQLVESGGGLVQAGGSLRLSCTASGRTFSTYTMAWFRQAPGKEREFVSAISWSAVYYADAVKGRFTISRDNAKNTLYLQMNSLKPEDTAVYSCAAVIGSTVDSYSPSDPLEYDYWDQGTQVTVS

SEQ ID NO: 275 - protein, 127 aa, Homo sapiens
MAQVQLVESGGGLVQAGGSLRLSCTASGRTFSTYTMAWFRQAPGKEREFVGAISWSAVYYADSVKGRFTISRDNAKNTLYLQMNSLKPEDTAVYICAAVIGSTVDSYSPSDPLEYDYWGQGTQVTVS

SEQ ID NO: 276 - protein, 127 aa, Homo sapiens
MAQVQLVESGGGLVQAGGSLRLSCTASGRTFSTYTMAWFRQAPGKEREFVASISWSGTYYADSVKGRFTISRDNAKNTVYLQMNSLKPEDTAVYYCAAVIGSTVDSYSPGDPLEYDYWGQGTQVTVS

SEQ ID NO: 277 - protein, 127 aa, Homo sapiens
MAQVQLVESGGGLVQAGGSLRLSCTASGRTFSTYTMAWFRQAPGKEREFVAAVSWSGAYYADSVKGRFTISRDNAKNTVYLQMNSLKPEDTAVYYCAAVIGSTVDSYSPSDPLEYDYWGQGTQVTVS

SEQ ID NO: 278 - protein, 127 aa, Homo sapiens
MAQVQLVESGGGLVQAGGSLRLSCTASGRTFSTYTMAWFRQAPGKEREFVAAITWSTTYYVDSVKGRFTISRDNAKNTMYLQMNNLKPEDTAVYICAAVIGSTVDSYSPSDPLEYDYWGQGTQVTVS

SEQ ID NO: 279 - protein, 127 aa, Homo sapiens
MAQVQLVESGGGLVQAGGSLRLSCTASGRTFSTYTMAWFRQAPGKEREFVAAITWSTTYYADSVKGRFTISRDNAKNTMYLQMNNLKPEDTAVYICAAVIGSTVDSYSPSDPLEYDYWGQGTQVTVS

SEQ ID NO: 280 - protein, 127 aa, Homo sapiens
MAQVQLVESGGGLVQAGGSLRLSCTASGRTFSTYTMAWFRQAPGKEREFVAAITWSGTYYADSVKGRFTISRENAKNTMYLQMNSLKPEDTAVYICAAVIGSTVDSYSPSDPLEYDYWGQGTQVTVS

SEQ ID NO: 281 - protein, 127 aa, Homo sapiens
MAQVQLVESGGGLVQAGGSLRLSCTASGRTFSTYTMAWFRQAPGKEREFVAAITWSGTYYADSVKGRFTISRDNAKNTVYLQMNSLKPEDTAVYYCAAVIGSTVDSYSPSDPLEYDYWGQGTQVTVS

SEQ ID NO: 282 - protein, 127 aa, Homo sapiens
MAQVQLVESGGGLVQAGGSLRLSCTASGRTFSTYTMAWFRQAPGKEREFVAAITWSGTYYADSVKGRFTISRDNAKNTMYLQMNSLKPEDTAVYICAAVIGSTVDSYTPSDPLEYDYWGQGTQVTVS

SEQ ID NO: 283 - protein, 127 aa, Homo sapiens
MAQVQLVESGGGLVQAGGSLRLSCTASGRTFSTYTMAWFRQAPGKEREFVAAITWSGTYYADSVKGRFTISRDNAKNTMYLQMNSLKPEDTAVYICAAVIGSTVDSYSPSDPLEYDYWGQRTQVTVS

SEQ ID NO: 284 - protein, 127 aa, Homo sapiens
MAQVQLVESGGGLVQAGGSLRLSCTASGRTFSTYTMAWFRQAPGKEREFVAAITWSGTYYADSVKGRFTISRDNAKNTMYLQMNSLKPEDTAVYICAAVIGSTVDSYSPSDPLEYDYWGQGTQVTVS

SEQ ID NO: 285 - protein, 127 aa, Homo sapiens
MAQVQLVESGGGLVQAGGSLRLSCTASGRTFSTYTMAWFRQAPGKEREFVAAITWSGTYYADSVKGRFTISRDNAKNTMYLQMNSLKPEDTAVYICAAVIGSTVDSYSPSDPLEYDYWDQGTQVTVS

SEQ ID NO: 286 - protein, 127 aa, Homo sapiens
MAQVQLVESGGGLVQAGGSLRLSCTASGRTFSTYTMAWFRQAPGKEREFVAAISWSGTYYVDSVKGRFTISRDNAKNTVYLQMNSLKPEDTAVYYCAAVIGSTVDSYSPSDPLEYDYWGQGTQVTVS

SEQ ID NO: 287 - protein, 127 aa, Homo sapiens
MAQVQLVESGGGLVQAGGSLRLSCTASGRTFSTYTMAWFRQAPGKEREFVAAISWSGTYYTDSVKGRFTISRDNAKNTVYLQMNSLKPEDTAVYYCAAVIGSTVDSYSPSDPLEYDYWGQGTQVTVS

SEQ ID NO: 288 - protein, 127 aa, Homo sapiens
MAQVQLVESGGGLVQAGGSLRLSCTASGRTFSTYTMAWFRQAPGKEREFVAAISWSGTYYAESVKGRFTISRDNAKNTVYLQMNSLKPEDTAVYYCAAVIGSTVDSYSPSDPLEYDYWGQGTQVTVS

SEQ ID NO: 289 - protein, 127 aa, Homo sapiens
MAQVQLVESGGGLVQAGGSLRLSCTASGRTFSTYTMAWFRQAPGKEREFVAAISWSGTYYADSVKGRFTISRDNTKNTVYLQMNSLKPEDTAVYYCAAVIGSTVDSYSPSDPLEYDYWGQGTQVTVS

SEQ ID NO: 290 - protein, 127 aa, Homo sapiens
MAQVQLVESGGGLVQAGGSLRLSCTASGRTFSTYTMAWFRQAPGKEREFVAAISWSGTYYADSVKGRFTISRDNAKNTVYLQMNSPKPEDTAVYYCAAVIGSTVDSYSPSDPLEYDYWGQGTQVTVS

SEQ ID NO: 291 - protein, 127 aa, Homo sapiens
MAQVQLVESGGGLVQAGGSLRLSCTASGRTFSTYTMAWFRQAPGKEREFVAAISWSGTYYADSVKGRFTISRDNAKNTVYLQMNSMKPEDTAVYYCAAVIGSTVDSYSPSDPLEYDYWGQGTQVTVS

SEQ ID NO: 292 - protein, 127 aa, Homo sapiens
MAQVQLVESGGGLVQAGGSLRLSCTASGRTFSTYTMAWFRQAPGKEREFVAAISWSGTYYADSVKGRFTISRDNAKNTVYLQMNSLRPEDTAVYYCAAVIGSTVDSYSPSDPLEYDYWGQGTQVTVS

SEQ ID NO: 293 - protein, 127 aa, Homo sapiens
MAQVQLVESGGGLVQAGGSLRLSCTASGRTFSTYTMAWFRQAPGKEREFVAAISWSGTYYADSVKGRFTISRDNAKNTVYLQMNSLKPEDTVVYYCAAVIGSTVDSYSPSDPLEYDYWGQGTQVTVS

SEQ ID NO: 294 - protein, 127 aa, Homo sapiens
MAQVQLVESGGGLVQAGGSLRLSCTASGRTFSTYTMAWFRQAPGKEREFVAAISWSGTYYADSVKGRFTISRDNAKNTVYLQMNSLKPEDTTVYYCAAVIGSTVDSYSPSDPLEYDYWGQGTQVTVS

SEQ ID NO: 295 - protein, 127 aa, Homo sapiens
MAQVQLVESGGGLVQAGGSLRLSCTASGRTFSTYTMAWFRQAPGKEREFVAAISWSGTYYADSVKGRFTISRDNAKNTVYLQMNSLKPEDTAVYYCAAVSGSTVDSYSPSDPLEYDYWGQGTQVTVS

SEQ ID NO: 296 - protein, 127 aa, Homo sapiens
MAQVQLVESGGGLVQAGGSLRLSCTASGRTFSTYTMAWFRQAPGKEREFVAAISWSGTYYADSVKGRFTISRDNAKNTVYLQMNSLKPEDTAVYYCAAVIWSTVDSYSPSDPLEYDYWGQGTQVTVS

SEQ ID NO: 297 - protein, 127 aa, Homo sapiens
MAQVQLVESGGGLVQAGGSLRLSCTASGRTFSTYTMAWFRQAPGKEREFVAAISWSGTYYADSVKGRFTISRDNAKNTVYLQMNSLKPEDTAVYYCAAVIGSTVDSYSPSYPLEYDYWGQGTQVTVS

SEQ ID NO: 298 - protein, 127 aa, Homo sapiens
MAQVQLVESGGGLVQAGGSLRLSCTASGRTFSTYTMAWFRQAPGKEREFVAAISWSGTYYADSVKGRFTISRDNAKNTVYLQMNSLKPEDTAVYYCAAVIGSTVDSYSPSNPLEYDYWGQGTQVTVS

SEQ ID NO: 299 - protein, 127 aa, Homo sapiens
MAQVQLVESGGGLVQAGGSLRLSCTASGRTFSTYTMAWFRQAPGKEREFVAAISWSGTYYADSVKGRFTISRDNAKNTVYLQMNSLKPEDTAVYYCAAVIGSTVDSYSPSDPREYDYWGQGTQVTVS

SEQ ID NO: 300 - protein, 127 aa, Homo sapiens
MAQVQLVESGGGLVQAGGSLRLSCTASGRTFSTYTMAWFRQAPGKEREFVAAISWSGTYYADSVKGRFTISRDNAKNTVYLQMNSLKPEDTAVYYCAAVIGSTVDSYSPSDPLEYDYWGQGTQVTVS

SEQ ID NO: 301 - protein, 126 aa, Homo sapiens
MAQVQLVESGGGLVQAGGSLRLSCTASGRTFSTYTMAWFRQAPGKEREFVAAISWSGTYYADSVKGRFTISRDNAKNTVYLQMNSLKPEDTAVYYCAAVIGSTVDSYSPSDPLEYDYWGQGPRSPS

SEQ ID NO: 302 - protein, 127 aa, Homo sapiens
MAQVQLVESGGGLVQAGGSLRLSCTASGRTFSTYTMAWFRQAPGKEREFVAAISWSGTYYADSVKGRFTISRDNAKNTVYLQMNSLKPEDTAVYYCAAVIGSTVDSYSPSDPLEYDYWGHGTQVTVS

SEQ ID NO: 303 - protein, 127 aa, Homo sapiens
MAQVQLVESGGGLVQAGGSLRLSCTASGRTFSTYTMAWFRQAPGKEREFVAAISWSGTYYADSVKGRFTISRDNAKNTVYLQMNSLKPEDTAVYYCAAVIGSTVDSYSPSDPLEYDYWDQGTQVTVS

SEQ ID NO: 304 - protein, 127 aa, Homo sapiens
MAQVQLVESGGGLVQAGGSLRLSCTASGRTFSTYTMAWFRQAPGKEREFVAAISWSGTYYADSVKGRFTISRDNAKNTVYLQMNSLKPEDTAVYYCAAVIGSTVDSYSPSDPLEYDDWGQGTQVTVS

SEQ ID NO: 305 - protein, 127 aa, Homo sapiens
MAQVQLVESGGGLVQAGGSLRLSCTASGRTFSTYTMAWFRQAPGKEREFVAAISWSGTYYADSVKGRFTISRDNAKNTVYLQMNSLKPEDTAVYYCAAVIGSTVDSYSPSDHLEYDYWGQGTQVTVS

SEQ ID NO: 306 - protein, 127 aa, Homo sapiens
MAQVQLVESGGGLVQAGGSLRLSCTASGRTFSTYTMAWFRQAPGKEREFVAAISWSGTYYADSVKGRFTISRDNAKNTVYLQMNSLKPEDTAVYYCAAVIGSTVDSYSPGDPLEYDYWGQGTQVTVS

SEQ ID NO: 307 - protein, 127 aa, Homo sapiens
MAQVQLVESGGGLVQAGGSLRLSCTASGRTFSTYTMAWFRQAPGKEREFVAAISWSGTYYADSVKGRFTISRDNAKNTVYLQMNSLKPEDTAVYYCAAVIGSTIDSYSPSDPLEYDYWGQGTQVTVS

SEQ ID NO: 308 - protein, 127 aa, Homo sapiens
MAQVQLVESGGGLVQAGGSLRLSCTASGRTFSTYTMAWFRQAPGKEREFVAAISWSGTYYADSVKGRFTISRDNAKNTVYLQMNSLKPEDTAVYHCAAVIGSTVDSYSPSDPLEYDYWGQGTQVTVS

SEQ ID NO: 309 - protein, 127 aa, Homo sapiens
MAQVQLVESGGGLVQAGGSLRLSCTASGRTFSTYTMAWFRQAPGKEREFVAAISWSGTYYADSVKGRFTISRDNAKNTVYLQMKSLKPEDTAVYYCAAVIGSTVDSYSPSDPLEYDYWGQGTQVTVS

SEQ ID NO: 310 - protein, 127 aa, Homo sapiens
MAQVQLVESGGGLVQAGGSLRLSCTASGRTFSTYTMAWFRQAPGKEREFVAAISWSGTYYADSVKGRFTISRDNAKNTVYLQINSLKPEDTAVYYCAAVIGSTVDSYSPSDPLEYDYWGQGTQVTVS

SEQ ID NO: 311 - protein, 127 aa, Homo sapiens
MAQVQLVESGGGLVQAGGSLRLSCTASGRTFSTYTMAWFRQAPGKEREFVAAISWSGTYYADSVKGRFTISRDNAKNTMYLQMNSLKPEDTAVYYCAAVIGSTVDSYSPSDPLEYDYWGQGTQVTVS

SEQ ID NO: 312 - protein, 127 aa, Homo sapiens
MAQVQLVESGGGLVQAGGSLRLSCTASGRTFSTYTMAWFRQAPGKEREFVAAISWSGTYYADSVKGRFTISGDNAKNTVYLQMNSLKPEDTAVYYCAAVIGSTVDSYSPSDPLEYDYWGQGTQVTVS

SEQ ID NO: 313 - protein, 127 aa, Homo sapiens
MAQVQLVESGGGLVQAGGSLRLSCTASGRTFSTYTMAWFRQAPGKEREFVAAISWSGTYYADSVKGRFIISRDNAKNTVYLQMNSLKPEDTAVYYCAAVIGSTVDSYSPSDPLEYDYWGQGTQVTVS

SEQ ID NO: 314 - protein, 127 aa, Homo sapiens
MAQVQLVESGGGLVQAGGSLRLSCTASGRTFSTYTMAWFRQAPGKEREFVAAISWSGTYYADSVKGQFTISRDNAKNTVYLQMNSLKPEDTAVYYCAAVIGSTVDSYSPSDPLEYDYWGQGTQVTVS

SEQ ID NO: 315 - protein, 127 aa, Homo sapiens
MAQVQLVESGGGLVQAGGSLRLSCTASGRTFSTYTMAWFRQAPGKEREFVAAISWSGTYYADSVKDRFTISRDNAKNTVYLQMNSLKPEDTAVYYCAAVIGSTVDSYSPSDPLEYDYWGQGTQVTVS

SEQ ID NO: 316 - protein, 127 aa, Homo sapiens
MAQVQLVESGGGLVQAGGSLRLSCTASGRTFSTYTMAWFRQAPGKEREFVAAISWSGTYYADSMKGRFTISRDNAKNTVYLQMNSLKPEDTAVYYCAAVIGSTVDSYSPSDPLEYDYWGQGTQVTVS

SEQ ID NO: 317 - protein, 127 aa, Homo sapiens
MAQVQLVESGGGLVQAGGSLRLSCTASGRTFSTYTMAWFRQAPGKEREFVAAISWSGAYYVESVKGRFTISRDNAKNTVYLQMNSLKPEDTAVYYCAAVIGSTVDSYSPSDPLEYDYWGQGTQVTVS

SEQ ID NO: 318 - protein, 127 aa, Homo sapiens
MAQVQLVESGGGLVQAGGSLRLSCTASGRTFSTYTMAWFRQAPGKEREFVAAISWSGAYYTESVKGRFTISRDNAKNTVYLQMNSLKPEDTAVYYCAAVIGSTVDSYSPSDPLEYDYWGQGTQVTVS

SEQ ID NO: 319 - protein, 127 aa, Homo sapiens
MAQVQLVESGGGLVQAGGSLRLSCTASGRTFSTYTMAWFRQAPGKEREFVAAISWSGAYYLDSVKGRFTISRDNAKNTVYLQMNSLKPEDTAIYYCAAVIGSTVDSYSPSDPLEYDYWGPGTQVTVS

SEQ ID NO: 320 - protein, 127 aa, Homo sapiens
MAQVQLVESGGGLVQAGGSLRLSCTASGRTFSTYTMAWFRQAPGKEREFVAAISWSGAYYAESVKGRLTISRDNAKNTVYLQMNSLKPEDTAVYYCAAVIGSTVDSYSPSDPLEYDYWGQGTQVTVS

SEQ ID NO: 321 - protein, 127 aa, Homo sapiens
MAQVQLVESGGGLVQAGGSLRLSCTASGRTFSTYTMAWFRQAPGKEREFVAAISWSGAYYAESVKGRFTVSRDNAKNTVYLQMNSLKPEDTAVYYCAAVIGSTVDSYSPSDPLEYDYWGQGTQVTVS

SEQ ID NO: 322 - protein, 127 aa, Homo sapiens
MAQVQLVESGGGLVQAGGSLRLSCTASGRTFSTYTMAWFRQAPGKEREFVAAISWSGAYYAESVKGRFTISRDNTKNTVYLQMNSLKPEDTAVYYCAAVIGSTVDSYSPSDPLEYDYWGQGTQVTVS

SEQ ID NO: 323 - protein, 127 aa, Homo sapiens
MAQVQLVESGGGLVQAGGSLRLSCTASGRTFSTYTMAWFRQAPGKEREFVAAISWSGAYYAESVKGRFTISRDNAKNTVYLQMNSMKPEDTAVYYCAAVIGSTVDSYSPSDPLEYDYWGQGTQVTVS

SEQ ID NO: 324 - protein, 127 aa, Homo sapiens
MAQVQLVESGGGLVQAGGSLRLSCTASGRTFSTYTMAWFRQAPGKEREFVAAISWSGAYYAESVKGRFTISRDNAKNTVYLQMNSLKPEDTVVYYCAAVIGSTVDSYSPSDPLEYDYWGQGTQVTVS

SEQ ID NO: 325 - protein, 127 aa, Homo sapiens
MAQVQLVESGGGLVQAGGSLRLSCTASGRTFSTYTMAWFRQAPGKEREFVAAISWSGAYYAESVKGRFTISRDNAKNTVYLQMNSLKPEDTTVYYCAAVIGSTVDSYSPSDPLEYDYWGQGTQVTVS

SEQ ID NO: 326 - protein, 127 aa, Homo sapiens
MAQVQLVESGGGLVQAGGSLRLSCTASGRTFSTYTMAWFRQAPGKEREFVAAISWSGAYYAESVKGRFTISRDNAKNTVYLQMNSLKPEDTAVYYCVAVIGSTVDSYSPSDPLEYDYWGQGTQVTVS

SEQ ID NO: 327 - protein, 127 aa, Homo sapiens
MAQVQLVESGGGLVQAGGSLRLSCTASGRTFSTYTMAWFRQAPGKEREFVAAISWSGAYYAESVKGRFTISRDNAKNTVYLQMNSLKPEDTAVYYCTAVIGSTVDSYSPSDPLEYDYWGQGTQVTVS

SEQ ID NO: 328 - protein, 127 aa, Homo sapiens
MAQVQLVESGGGLVQAGGSLRLSCTASGRTFSTYTMAWFRQAPGKEREFVAAISWSGAYYAESVKGRFTISRDNAKNTVYLQMNSLKPEDTAVYYCAAVIWSTVDSYSPSDPLEYDYWGQGTQVTVS

SEQ ID NO: 329 - protein, 127 aa, Homo sapiens
MAQVQLVESGGGLVQAGGSLRLSCTASGRTFSTYTMAWFRQAPGKEREFVAAISWSGAYYAESVKGRFTISRDNAKNTVYLQMNSLKPEDTAVYYCAAVIGSTVDSYSTSDPLEYDYWGQGTQVTVS

SEQ ID NO: 330 - protein, 127 aa, Homo sapiens
MAQVQLVESGGGLVQAGGSLRLSCTASGRTFSTYTMAWFRQAPGKEREFVAAISWSGAYYAESVKGRFTISRDNAKNTVYLQMNSLKPEDTAVYYCAAVIGSTVDSYSPSDPREYDYWGQGTQVTVS

SEQ ID NO: 331 - protein, 127 aa, Homo sapiens
MAQVQLVESGGGLVQAGGSLRLSCTASGRTFSTYTMAWFRQAPGKEREFVAAISWSGAYYAESVKGRFTISRDNAKNTVYLQMNSLKPEDTAVYYCAAVIGSTVDSYSPSDPLKYDYWGQGTQVTVS

SEQ ID NO: 332 - protein, 127 aa, Homo sapiens
MAQVQLVESGGGLVQAGGSLRLSCTASGRTFSTYTMAWFRQAPGKEREFVAAISWSGAYYAESVKGRFTISRDNAKNTVYLQMNSLKPEDTAVYYCAAVIGSTVDSYSPSDPLEYDYWGRGTQVTVS

SEQ ID NO: 333 - protein, 127 aa, Homo sapiens
MAQVQLVESGGGLVQAGGSLRLSCTASGRTFSTYTMAWFRQAPGKEREFVAAISWSGAYYAESVKGRFTISRDNAKNTVYLQMNSLKPEDTAVYYCAAVIGSTVDSYSPSDPLEYDYWGQGTQVTVS

SEQ ID NO: 334 - protein, 127 aa, Homo sapiens
MAQVQLVESGGGLVQAGGSLRLSCTASGRTFSTYTMAWFRQAPGKEREFVAAISWSGAYYAESVKGRFTISRDNAKNTVYLQMNSLKPEDTAVYYCAAVIGSTVDSYSPSDPLEYDYWGHGTQVTVS

SEQ ID NO: 335 - protein, 126 aa, Homo sapiens
MAQVQLVESGGGLVQAGGSLRLSCTASGRTFSTYTMAWFRQAPGKEREFVAAISWSGAYYAESVKGRFTISRDNAKNTVYLQMNSLKPEDTAVYYCAAVIGSTVDSYSPSDPLEYDYWARGPRSPS

SEQ ID NO: 336 - protein, 127 aa, Homo sapiens
MAQVQLVESGGGLVQAGGSLRLSCTASGRTFSTYTMAWFRQAPGKEREFVAAISWSGAYYAESVKGRFTISRDNAKNTVYLQMNSLKPEDTAVYYCAAVIGSTVDSYSPSDPLEYDDWGQGTQVTVS

SEQ ID NO: 337 - protein, 127 aa, Homo sapiens
MAQVQLVESGGGLVQAGGSLRLSCTASGRTFSTYTMAWFRQAPGKEREFVAAISWSGAYYAESVKGRFTISRDNAKNTVYLQMNSLKPEDTAVYYCAAVIGSTVDSYSPSDPLEDDYWGQGTQVTVS

SEQ ID NO: 338 - protein, 127 aa, Homo sapiens
MAQVQLVESGGGLVQAGGSLRLSCTASGRTFSTYTMAWFRQAPGKEREFVAAISWSGAYYAESVKGRFTISRDNAKNTVYLQMNSLKPEDTAVYYCAAVIGSTVDSYSPSDPLECDYWGQGTQVTVS

SEQ ID NO: 339 - protein, 127 aa, Homo sapiens
MAQVQLVESGGGLVQAGGSLRLSCTASGRTFSTYTMAWFRQAPGKEREFVAAISWSGAYYAESVKGRFTISRDNAKNTVYLQMNSLKPEDTAVYYCAAVIGSTVDSYSPSDHLEYDYWGQGTQVTVS

SEQ ID NO: 340 - protein, 127 aa, Homo sapiens
MAQVQLVESGGGLVQAGGSLRLSCTASGRTFSTYTMAWFRQAPGKEREFVAAISWSGAYYAESVKGRFTISRDNAKNTVYLQMNSLKPEDTAVYYCAAVIGSTVDSYSPGDPLEYDYWGQGTQVTVS

SEQ ID NO: 341 - protein, 127 aa, Homo sapiens
MAQVQLVESGGGLVQAGGSLRLSCTASGRTFSTYTMAWFRQAPGKEREFVAAISWSGAYYAESVKGRFTISRDNAKNTVYLQMNSLKPEDTAVYYCAAVIGSTVDSYSHSDPLEYDYWGQGTQVTVS

SEQ ID NO: 342 - protein, 127 aa, Homo sapiens
MAQVQLVESGGGLVQAGGSLRLSCTASGRTFSTYTMAWFRQAPGKEREFVAAISWSGAYYAESVKGRFTISRDNAKNTVYLQMNSLKPEDTAVYYCAAVIGSTVDSYGPSDPLEYDYWGQGTQVTVS

SEQ ID NO: 343 - protein, 127 aa, Homo sapiens
MAQVQLVESGGGLVQAGGSLRLSCTASGRTFSTYTMAWFRQAPGKEREFVAAISWSGAYYAESVKGRFTISRDNAKNTVYLQMNSLKPEDTAVYYCAAVIGSTIDSYSPSDPLEYDYWGQGTQVTVS

SEQ ID NO: 344 - protein, 127 aa, Homo sapiens
MAQVQLVESGGGLVQAGGSLRLSCTASGRTFSTYTMAWFRQAPGKEREFVAAISWSGAYYAESVKGRFTISRDNAKNTVYLQMNSLKPEDTAVYYCAAVIGSTADSYSPSDPLEYDYWGQGTQVTVS

SEQ ID NO: 345 - protein, 127 aa, Homo sapiens
MAQVQLVESGGGLVQAGGSLRLSCTASGRTFSTYTMAWFRQAPGKEREFVAAISWSGAYYAESVKGRFTISRDNAKNTVYLQMNSLKPEDTAVYYCAAVIGSAVDSYSPSDPLEYDYWGQGTQVTVS

SEQ ID NO: 346 - protein, 127 aa, Homo sapiens
MAQVQLVESGGGLVQAGGSLRLSCTASGRTFSTYTMAWFRQAPGKEREFVAAISWSGAYYAESVKGRFTISRDNAKNTVYLQMNSLKPEDTAVYYCAAVIGATVDSYSPSDPLEYDYWGQGTQVTVS

SEQ ID NO: 347 - protein, 127 aa, Homo sapiens
MAQVQLVESGGGLVQAGGSLRLSCTASGRTFSTYTMAWFRQAPGKEREFVAAISWSGAYYAESVKGRFTISRDNAKNTVYLQMNSLKPEDTAVYYCAAAIGSTVDSYSPSDPLEYDYWGQGTQVTVS

SEQ ID NO: 348 - protein, 127 aa, Homo sapiens
MAQVQLVESGGGLVQAGGSLRLSCTASGRTFSTYTMAWFRQAPGKEREFVAAISWSGAYYAESVKGRFTISRDNAKNTVYLQMNSLKPEDTAVYHCAAVIGSTVDSYSPSDPLEYDYWGQGTQVTVS

SEQ ID NO: 349 - protein, 127 aa, Homo sapiens
MAQVQLVESGGGLVQAGGSLRLSCTASGRTFSTYTMAWFRQAPGKEREFVAAISWSGAYYAESVKGRFTISRDNAKNTVYLQMNSLKPEDMAVYYCAAVIGSTVDSYSPSDPLEYDYWGQGTQVTVS

SEQ ID NO: 350 - protein, 127 aa, Homo sapiens
MAQVQLVESGGGLVQAGGSLRLSCTASGRTFSTYTMAWFRQAPGKEREFVAAISWSGAYYAESVKGRFTISRDNAKNTVYLQMNSLKPDDTAVYYCAAVIGSTVDSYSPSDPLEYDYWGQGTQVTVS

SEQ ID NO: 351 - protein, 127 aa, Homo sapiens
MAQVQLVESGGGLVQAGGSLRLSCTASGRTFSTYTMAWFRQAPGKEREFVAAISWSGAYYAESVKGRFTISRDNAKNTMYLQMNSLKPEDTAVYYCAAVIGSTVDSYSPSDPLEYDYWGQGTQVTVS

SEQ ID NO: 352 - protein, 127 aa, Homo sapiens
MAQVQLVESGGGLVQAGGSLRLSCTASGRTFSTYTMAWFRQAPGKEREFVAAISWSGAYYAESVKGRFTISRDNAKNMVYLQMNSLKPEDTAVYYCAAVIGSTVDSYSPSDPLEYDYWGQGTQVTVS

SEQ ID NO: 353 - protein, 127 aa, Homo sapiens
MAQVQLVESGGGLVQAGGSLRLSCTASGRTFSTYTMAWFRQAPGKEREFVAAISWSGAYYAESVKGRFTISIDNAKNTVYLQMNSLKPEDTAVYYCAAVIGSTVDSYSPSDPLEYDYWGQGTQVTVS

SEQ ID NO: 354 - protein, 127 aa, Homo sapiens
MAQVQLVESGGGLVQAGGSLRLSCTASGRTFSTYTMAWFRQAPGKEREFVAAISWSGAYYAESVKDRFTISRDNAKNTVYLQMNSLKPEDTAVYYCAAVIGSTVDSYSPSDPLEYDYWGQGTQVTVS

SEQ ID NO: 355 - protein, 127 aa, Homo sapiens
MAQVQLVESGGGLVQAGGSLRLSCTASGRTFSTYTMAWFRQAPGKEREFVAAISWSGAYYAESMKGRFTISRDNAKNTVYLQMNSLKPEDTAVYYCAAVIGSTVDSYSPSDPLEYDYWGQGTQVTVS

SEQ ID NO: 356 - protein, 127 aa, Homo sapiens
MAQVQLVESGGGLVQAGGSLRLSCTASGRTFSTYTMAWFRQAPGKEREFVAAISWSGAYYAEPVKGRFTISRDNAKNTVYLQMNSLKPEDTAVYYCAAVIGSTVDSYSPSDPLEYDYWGQGTQVTVS

SEQ ID NO: 357 - protein, 127 aa, Homo sapiens
MAQVQLVESGGGLVQAGGSLRLSCTASGRTFSTYTMAWFRQAPGKEREFVAAISWSGAYYADSVTGRFTISRDNAKNTVYLQMNSLKPEDTAVYYCAAVIGSTVDSYRPGDPLEYDYWGQGTQVTVS

SEQ ID NO: 358 - protein, 127 aa, Homo sapiens
MAQVQLVESGGGLVQAGGSLRLSCTASGRTFSTYTMAWFRQAPGKEREFVAAISWSGAYCAESVKGRFTISRDNAKNTVYLQMNSLKPEDTAVYYCAAVIGSTVDSYSPSDPLEYDYWGQGTQVTVS

SEQ ID NO: 359 - protein, 127 aa, Homo sapiens
MAQVQLVESGGGLVQAGGSLRLSCTASGRTFSTYTMAWFRQAPGKEREFVAAISLSGAYYAESVKGRFTISRDNAKNTVYLQMNSLKPEDTAVYYCAAVIGSTVDSYSPSDPLEYDYWGQGTQVTVS

SEQ ID NO: 360 - protein, 127 aa, Homo sapiens
MAQVQLVESGGGLVQAGGSLRLSCTASGRTFSTYTMAWFRQAPGKEREFVAAIAWSGAYYADSVKGRFTISRDNAKNTVYLQMNSLKPEDTAVYICAAAIGSTVDSYSPSDPLEYDYWGQGTQVTVS

SEQ ID NO: 361 - protein, 127 aa, Homo sapiens
MAQVQLVESGGGLVQAGGSLRLSCTASGRTFSTYTMAWFRQAPGKERDFVAAISWTGVYYADSVKGRFTISRDNAKNTVYLQMNSLKPEDTAVYYCAAVIGSTVDSYSPSDPLEYDYWGQGTQVTVS

SEQ ID NO: 362 - protein, 127 aa, Homo sapiens
MAQVQLVESGGGLVQAGGSLRLSCTASGRTFSTYTMAWFRQAPGKERDFVAAISWSGVYYADSVKGRFTISRDNAKNTVYLQMNSLKPEDTAVYYCAAVIGSTVDSYSPSDPLEYDYWGQGTQVTVS

SEQ ID NO: 363 - protein, 127 aa, Homo sapiens
MAQVQLVESGGGLVQAGGSLRLSCTASGRTFSTYTMAWFRQAPGKERDFVAAISWSGVYYADSVKGRFTISRDNAKNTVFLQMNSLKPEDTAVYYCAAVIGSTVDSYSPSDPLEYDYWGQGTQVTVS

SEQ ID NO: 364 - protein, 127 aa, Homo sapiens
MAQVQLVESGGGLVQAGGSLRLSCTASGRTFSTYTMAWFRQAPGKERDFVAAISWSGTYYADSVKGRYTISRDNAKNTVYLQMNSLKPEDTAVYYCAAVIGSTVDSYSPSDPLEYDYWGQGTQVTVS

SEQ ID NO: 365 - protein, 127 aa, Homo sapiens
MAQVQLVESGGGLVQAGGSLRLSCTASGRTFSTYTMAWFRQAPGKERDFVAAISWSGTYYADSVKGRYTISRDNAKNTVHLQMNSLKPEDTAVYYCTAVIGSTVDSYSPSDPLEYDYWGQGTQVTVS

SEQ ID NO: 366 - protein, 127 aa, Homo sapiens
MAQVQLVESGGGLVQAGGSLRLSCTASGRTFSTYTMAWFRQAPGKERDFVAAISWSGAYYADSVKGRFTISRDNAKNTVYLQMNSLKPEDTAVYYCAAVIGSTVDSYSPSDPLEYDYWGQGTQVTVS

SEQ ID NO: 367 - protein, 127 aa, Homo sapiens
MAQVQLVESGGGLVQAGGSLRLSCTASGRTFSTYTMAWFRQAPGKERDFVAAISWSGAYYADSVKGRFTISRDNAKNTVYLQMNSLKPEDTAVYYCAAVIGSTVDSYSPSDPLDYDYWGQGTQVTVS

SEQ ID NO: 368 - protein, 127 aa, Homo sapiens
MAQVQLVESGGGLVQAGGSLRLSCTASGRTFSTYTMAWFRQAPGKERDFVAAISWSGAYYADSVKGRFTISRDNAKNTVYLQMNSLKPEDTAVYYCAAVIGSTVDSYSPSDPLDYDYWGKGTQVTVS

SEQ ID NO: 369 - protein, 127 aa, Homo sapiens
MAQVQLVESGGGLVQAGGSLRLSCTASGRTFSTYTMAWFRQAPGKERDFVAAISWSGAYYADSAKGRFTISRDNAKNTVYLQMNSLKPEDTAVYVCAAVIGSTVDSYSPSDPLEYDYWGQGTQVTVS

SEQ ID NO: 370 - protein, 127 aa, Homo sapiens
MAQVQLVESGGGLVQAGGSLRLSCTASGRTFSTYTMAWFRQAPGKERDFVAAIDWSGVYYADSVKGRFTISRDNAKNTLYLQMNSLKPEDTAVYYCAAVIGSTVDSYSPSDPLEYDYWGQGTQVTVS

SEQ ID NO: 371 - protein, 127 aa, Homo sapiens
MAQVQLVESGGGLVQAGGSLRLSCTASGRTFSTYTMAWFRQAPGKEHEFVAAISWSGTYYADSVKGRFTISRDNAKNTVYLQMNSLKPEDTAVYYCAAVIGSTVDSYSPSDPLEYDYWGQGTQVTVS

SEQ ID NO: 372 - protein, 127 aa, Homo sapiens
MAQVQLVESGGGLVQAGGSLRLSCTASGRTFSTYTMAWFRQAPGKEHEFVAAISWSGAYYAESVKGRFTISRDNAKNTVYLQMNSLKPEDTAVYYCAAVIGSTVDSYSPSDPLEYDYWGQGTQVTVS

SEQ ID NO: 373 - protein, 127 aa, Homo sapiens
MAQVQLVESGGGLVQAGGSLRLSCTASGRTFSTYTMAWFRQAPGKECEFVAAISWSGAYYAESVKGRFTISRDNAKNTVYLQMNSLKPEDTAVYYCAAVIGSTVDSYSPSDPLEYDYWGQGTQVTVS

SEQ ID NO: 374 - protein, 127 aa, Homo sapiens
MAQVQLVESGGGLVQAGGSLRLSCTASGRTFSTYTMAWFHQAPGKEREFVAAISWSGTYYADSVKGRFTISRDNAKNTVYLQMNSLKPEDTAVYYCAAVIGSTVDSYSPSDPLEYDYWGQGTQVTVS

SEQ ID NO: 375 - protein, 127 aa, Homo sapiens
MAQVQLVESGGGLVQAGGSLRLSCTASGRTFSTYTMAWFHQAPGKEREFVAAISWSGAYYAESVKGRFTISRDNAKNTVYLQMNSLKPEDTAVYYCAAVIGSTVDSYSPSDPLEYDYWGQGTQVTVS

SEQ ID NO: 376 - protein, 127 aa, Homo sapiens
MAQVQLVESGGGLVQAGGSLRLSCTASGRTFSTYTMAWFCQAPGKEREFVAAISWSGAYYAESVKGRFTISRDNAKNTVYLQMNSLKPEDTAVYYCAAVIGSTVDSYSPSDPLEYDYWGQGTQVTVS

SEQ ID NO: 377 - protein, 127 aa, Homo sapiens
MAQVQLVESGGGLVQAGGSLRLSCTASGRTFSTYTMARFRQAPGKEREFVAAISWSGTYYADSVKGRFTISRDNAKNTVYLQMNSLKPEDTAVYYCAAVIGSTVDSYSPSDPLEYDYWGQGTQVTVS

SEQ ID NO: 378 - protein, 127 aa, Homo sapiens
MAQVQLVESGGGLVQAGGSLRLSCTASGRTFSTYTMARFRQAPGKERDFVAAISWSGAYYADSVKGRFTISRDNAKNTVYLQMNSLKPEDTAVYYCAAVIGSTVDSYSPSDPLDYDYWGQGTQVTVS

SEQ ID NO: 379 - protein, 127 aa, Homo sapiens
MAQVQLVESGGGLVQAGGSLRLSCTASGRTFSTYTIAWFRQAPGKEREFVAAISWSGTYYADSVKGRFTISRDNAKNTVYLQMNSLKPEDTAVYYCAAVIGSTVDSYSPSDPLEYDYWGQGTQVTVS

SEQ ID NO: 380 - protein, 127 aa, Homo sapiens
MAQVQLVESGGGLVQAGGSLRLSCTASGRTFSTYSMAWFRQAPGKEREFVAAISWSGAYYLDSVKGRFTISRDNAKNTVYLQMNSLKAEDTAVYYCAAVIGSTVDSYSPSDPLEYDYWGQGTQVTVS

SEQ ID NO: 381 - protein, 127 aa, Homo sapiens
MAQVQLVESGGGLVQAGGSLRLSCTASGRTFSTYIMAWFRQAPGKEREFVAAISWSGTYYADSVKGRFTISRDNAKNTVYLQMNSLKPEDTAVYYCAAVIGSTVDSYSPSDPLEYDYWGQGTQVTVS

SEQ ID NO: 382 - protein, 127 aa, Homo sapiens
MAQVQLVESGGGLVQAGGSLRLSCTASGRTFSTYAMAWFRQAPGKEREFVAAISWTGAYYLDSVKGRFTISRDNAKNTMYLQMNSLKPEDTAVYYCAAVIGSTVDSYSPSDPLEYDYWGQGTQVTVS

SEQ ID NO: 383 - protein, 127 aa, Homo sapiens
MAQVQLVESGGGLVQAGGSLRLSCTASGRTFSTYAMAWFRQAPGKEREFVAAISWSGVDYSESVKGRFTISRDNAKNTVYLQMNSLKPEDTAVYYCAAVIGSTVDSYSPSDPLEYDYWGQGTQVTVS

SEQ ID NO: 384 - protein, 127 aa, Homo sapiens
MAQVQLVESGGGLVQAGGSLRLSCTASGRTFSTYAMAWFRQAPGKEREFVAAISWSGAYYLDSVKGRFTISRDNAKNTVYLQMNSLKPEDTAVYYCAAVIGSTVDSYSPSDPLEYDYWGQGTQVTVS

SEQ ID NO: 385 - protein, 127 aa, Homo sapiens
MAQVQLVESGGGLVQAGGSLRLSCTASGRTFSTYAMAWFRQAPGKEREFVAAISWSGAYYLDSVKGRFTISRDNAKNTLYLQMNSLKPEDTAVYYCAAVIGSTVDSYNPSDPLEYDYWGQGTQVTVS

SEQ ID NO: 386 - protein, 127 aa, Homo sapiens
MAQVQLVESGGGLVQAGGSLRLSCTASGRTFSIYTMAWFRQAPGKEREFVAAISWSGAYYAESVKGRFTISRDNAKNTVYLQMNSLKPEDTAVYYCAAVIGSTVDSYSPSDPLEYDYWGQGTQVTVS

SEQ ID NO: 387 - protein, 127 aa, Homo sapiens
MAQVQLVESGGGLVQAGGSLRLSCTASGRTFNTYTMAWFRQAPGKEREFVAAISWSGTYYADSVKGRFTISRDNAKNTVYLQMNSLKPEDTVVYYCAAVIGSTVDSYSPSDPLEYDYWGQGTQVTVS

SEQ ID NO: 388 - protein, 127 aa, Homo sapiens
MAQVQLVESGGGLVQAGGSLRLSCTASGRTFNTYTMAWFRQAPGKEREFVAAISWSGTYYADSVKGRFTISRDNAKNTVYLQMNSLKPEDTAVYYCAAVIGSTVDSYSPSDPLEYDYWGQGTQVTVS

SEQ ID NO: 389 - protein, 127 aa, Homo sapiens
MAQVQLVESGGGLVQAGGSLRLSCTASGRTFGTYTMAWFRQAPGKEREFVAAISWSGTYYADSVKGRFTISRDNAKNTVYLQMNSLKPEDTAVYYCAAVIGSTVDSYSPSDPLEYDYWGQGTQVTVS

SEQ ID NO: 390 - protein, 129 aa, Homo sapiens
MAQVQLVESGGGLVQAGGSLRLSCSASGRTFSSYTMGWFRQAPKKEREFVAEIGGTGGGTGYTDSVKGRFTISRDNAKNTVYLQMNSLKPEDTVVYYCAAVIGSPTDSSDYRSSLDYDYWGQGTQVTVS

SEQ ID NO: 391 - protein, 129 aa, Homo sapiens
MAQVQLVESGGGLVQAGGSLRLSCSASGRTFSSYTMGWFRQAPKKEREFVAEIGGTGGGTGYTDSVKGRFTISRDNAKNTVYLQMNSLKPEDMAVYYCAAVIGSPTDSSDYRSSLDYDYWGQGTQVTVS

SEQ ID NO: 392 - protein, 129 aa, Homo sapiens
MAQVQLVESGGGLVQAGGSLRLSCSASGRTFSSYTMGWFHQAPKKEREFVAEIGGTGGGTGYTDSVKGRFTISRDNAKNTVYLQMNSLKPEDTAVYYCAAVIGSPTDSSDYRSSLDFDYWGQGTQVTVS

SEQ ID NO: 393 - protein, 122 aa, Homo sapiens
MAQVQLVESGGGLVQAGGSLRLSCQASGRTFDSGPMAWFRQAPGKEREFVAAIRRSPERIYYADSVKGRFTISRDNAKNTVYLQMNNLKPEDTAVYYCAAALSRSTSVDYDYWGQGTQVTVS

SEQ ID NO: 394 - protein, 126 aa, Homo sapiens
MAQVQLVESGGGLVQAGGSLRLSCAVSGVSFRNMGWFRQAPGKEREFVAAISWSGDSTVYVDSVKGRVTISRDNAKNTVYLEMNSLKPEDTAVYYCAADGRFRAGQIGPSLGLYHYWGQGTQVTVS

SEQ ID NO: 395 - protein, 126 aa, Homo sapiens
MAQVQLVESGGGLVQAGGSLRLSCAVSGVSFRNMGWFRQAPGKEREFVAAISWSGDSTVYADSVKGRVTISRDNAKNTVYLEMNTLKPEDTAVYYCAADGRFRAGQIGPSLGLYHYWGQGTQVTVS

SEQ ID NO: 396 - protein, 126 aa, Homo sapiens
MAQVQLVESGGGLVQAGGSLRLSCAVSGVSFRNMGWFRQAPGKEREFVAAISWSGDSTVYADSVKGRVTISRDNAKNTVYLEMNSLKPEDTAVYYCAADGRFRAGQIGPSLGLYHYWGQGTQVTVS

SEQ ID NO: 397 - protein, 126 aa, Homo sapiens
MAQVQLVESGGGLVQAGGSLRLSCAVSGVSFRNMGWFRQAPGKEREFVAAISWSGDSTVYADAVKGRVTISRDNAKNTVYLEMNSLKPEDTAVYYCAADGRFRAGEIGTSLGLYRYWGQGTQVTVS

SEQ ID NO: 398 - protein, 126 aa, Homo sapiens
MAQVQLVESGGGLVQAGGSLRLSCAVSGVSFRNMGWFRQAPGKEREFVAAISWGGDSTIYGDSVKGRVTISRDNAKNTAYLEMNSLKPEDTAVYYCAADGRFRAGRISSDLGLYHYWGQGTQVTVS

SEQ ID NO: 399 - protein, 126 aa, Homo sapiens
MAQVQLVESGGGLVQAGGSLRLSCAGSGRSFSSYDMGWFRRAPGKEREFVAAITGSRGSTYYADSVKGRFTISRDNAKNTVYLQMNSLKPEDTAVYYCAAGFGSVDGLEYSGSYDDWGQGTQVTVS

SEQ ID NO: 400 - protein, 126 aa, Homo sapiens
MAQVQLVESGGGLVQAGGSLRLSCAGSGRSFSSYDMGWFRRAPGKEREFVAAISGSRGSTYYADSVKGRFTISRDNAKNTVYLQMNSLKPEDTAVYYCAAGFGSVDGLEYSGSYDDWGQGTQVTVS

SEQ ID NO: 401 - protein, 131 aa, Homo sapiens
MAQVQLVESGGGLVQAGGSLRLSCADAASGRTFSTYTMGWFRQAPGKEREFVAHINWDGSNTYYADSVKGRFTISRDNAKNTMYLQMNSLKPEDTAVYYCAAAIGSTVDSYRHSDPLEYDYWGQGTQVTVS

SEQ ID NO: 402 - protein, 127 aa, Homo sapiens
MAQVQLVESGGGLVQAGGSLRLSCAATGRTSSDYAMGWFRQAPGKEREFVSAINWSGISTYYADSVKGRFTISRDNAKNTVHLQMNSLKPEDTAVYYCAAEKLESLRNWHDPLMYDYWGQGTQVTVS

SEQ ID NO: 403 - protein, 116 aa, Homo sapiens
MAQVQLVESGGGLVQAGGSLRLSCAASVSAFSSVPFAWYRQAPGKQRESVARIWLSDTGTYSDSVRGRFTISRDNAKQTLFLEMNSLKPEDTAVYYCNSWPNQNYAWGQGTQVTVS

SEQ ID NO: 404 - protein, 124 aa, Homo sapiens
MAQVQLVESGGGLVQAGGSLRLSCAASGSIGSINIMGWYRQAPGKQRELVASITTGGATNYADSVKGRFTISRDNAKNTVYLQMNSLKPEDTAVYYCNLDRGTHLGDSFERDDYWGRGTQVTVS

SEQ ID NO: 405 - protein, 124 aa, Homo sapiens
MAQVQLVESGGGLVQAGGSLRLSCAASGSIGSINIMGWYRQAPGKQRELVASITSGGATNYADSVKGRFTISRDNAKNTVYLQMNSLKPEDTAVYYCNLDRGTHLGDSFERDDYWGRGTQVTVS

SEQ ID NO: 406 - protein, 124 aa, Homo sapiens
MAQVQLVESGGGLVQAGGSLRLSCAASGSIGSINIMGWYRQAPGKQRELVASITSGGATNYADSVKGRFTISRDNAKNTMYLQMNSLKPEDTAVYYCNLDRGTHLGDSFERDDYWGRGTQVTVS

SEQ ID NO: 407 - protein, 124 aa, Homo sapiens
MAQVQLVESGGGLVQAGGSLRLSCAASGSIGSINIMGWYRQAPGKQRELVASITSGGATNYADSVKGRFTISRDNAKNAVYLQMNSLKPEDTTVYYCNLDRGTHLGDSFERDDYWGRGTQVTVS

SEQ ID NO: 408 - protein, 124 aa, Homo sapiens
MAQVQLVESGGGLVQAGGSLRLSCAASGSIGSINIMGWYRQAPGKQRELVASITSGGATNYADSVKGRFTISRDNAKNAVYLQMNSLKPEDTAVYYCNLDRGTHLGDSFERDDYWGRGTQVTVS

SEQ ID NO: 409 - protein, 129 aa, Homo sapiens
MAQVQLVESGGGLVQAGGSLRLSCAASGRTLMRYTMGWFRQAPGLERDFVAEISWSGGNTGYADSVKGRFTISRDNAKNTVYLQMNSLKPQDTAVYYCAAVIGSPTDYSDYRSSLDYDYWGQGTQVTVS

SEQ ID NO: 410 - protein, 130 aa, Homo sapiens
MAQVQLVESGGGLVQAGGSLRLSCAASGRTFTNYAMGWFRQAPGKDREFVVSISWTGSSTYYADSVKGRFTISRDNAKNTVFLQMNSLKPEDTAVYYCAARGGGSSVDSEYDVGEFEYDYWGQGTQVTVS

SEQ ID NO: 411 - protein, 129 aa, Homo sapiens
MAQVQLVESGGGLVQAGGSLRLSCAASGRTFTHLNMGWFRQAPGKEREFTAHINWSGGSTNYADSVKGRFTISRDNAKNTVYLQMNSLKPEDTAVYYCAATLGDSVDLDSDADPRGYDYWGQGTQVTVS

SEQ ID NO: 412 - protein, 129 aa, Homo sapiens
MAQVQLVESGGGLVQAGGSLRLSCAASGRTFSTYTMGWFRQAPGKEREFVAHISWSGSTTYYADSVKGRFTISRDNAKNTMYLQMNSLKPEDTSVYYCAVAIGSPVDSYRHSDPLEYDYWGQGTQVTVS

SEQ ID NO: 413 - protein, 129 aa, Homo sapiens
MAQVQLVESGGGLVQAGGSLRLSCAASGRTFSTYTMGWFRQAPGKEREFVAHINWSGSSTYYADSVKGRFTISRDNAKNTMYLQMNSLKPDDTAVYYCAVTIGSPVDSYRHSDPLEYDYWGQGTQVTVS

SEQ ID NO: 414 - protein, 128 aa, Homo sapiens
MAQVQLVESGGGLVQAGGSLRLSCAASGRTFSTYTMGWFRQAPGKEREFVAAVTWSETLYSDSVKGRFTISRDNAKNTVYLQMNSLKPEDTAVYYCAAVQGSPVDTIVVLTTSEEYDYWGQGTQVTVS

SEQ ID NO: 415 - protein, 129 aa, Homo sapiens
MAQVQLVESGGGLVQAGGSLRLSCAASGRTFSTYTMGWFRQAPGKEREFAAHINWSGGSTNYADSVKGRFTISRDNAKNTMYLQMNSLKPEDTAVYYCAAAIWSSVDSYDHSDPLEYDYWGQGTQVTVS

SEQ ID NO: 416 - protein, 129 aa, Homo sapiens
MAQVQLVESGGGLVQAGGSLRLSCAASGRTFSTYTMGWFHQAPGKEREFVAEISGTGGNTGYADSVKGRFTISRDNAKNTVYLQMNSLKPEDTAVYYCAAVIGSPTDSSDYHSSLDYDYWGQGTQVTVS

SEQ ID NO: 417 - protein, 129 aa, Homo sapiens
MAQVQLVESGGGLVQAGGSLRLSCAASGRTFSTYTMAWFRQAPGKEREFVADINWNGGSTYYADSVKGRFTISRDNAKNTVYLQMNSLKPEDTAVYYCAAAIGSTVDSYYHSDPLEYDYWGQGTQVTVS

SEQ ID NO: 418 - protein, 127 aa, Homo sapiens
MAQVQLVESGGGLVQAGGSLRLSCAASGRTFSTYTMAWFRQAPGKEREFVAAITWSGTYYADSVKGRFTISRDNAKNTMYLQMNSLKPEDTAVYICAAVIGSTVDSYSPSDPLEYDYWGQGTQVTVS

SEQ ID NO: 419 - protein, 127 aa, Homo sapiens
MAQVQLVESGGGLVQAGGSLRLSCAASGRTFSTYTMAWFRQAPGKEREFVAAISWSGTYYADSVKGRFTISRDNAKNTVYLQMNSLKPEDTAVYYCAAVIGSTVDSYSPSDPLEYDYWGQGTQVTVS

SEQ ID NO: 420 - protein, 127 aa, Homo sapiens
MAQVQLVESGGGLVQAGGSLRLSCAASGRTFSTYTMAWFRQAPGKEREFVAAISWSGAYYAESVKGRFTISRDNAKNTVYLQMNSLKPEDTAVYYCAAVIGSTVDSYSPSDPLEYDYWGQGTQVTVS

SEQ ID NO: 421 - protein, 127 aa, Homo sapiens
MAQVQLVESGGGLVQAGGSLRLSCAASGRTFSTYTMAWFRQAPGKEREFVAAISWSGAYYADSVTGRFTISRDNAKNTVYLQMNSLKPEDTAVYYCAAVIGSTVDSYRPGDPLEYDYWGQGTQVTVS

SEQ ID NO: 422 - protein, 129 aa, Homo sapiens
MAQVQLVESGGGLVQAGGSLRLSCAASGRTFSTYTMAWFRQAPGKEREFVAAISWNGGSTYYADSVKGRFTIFRDNAKNMVYLQMNNLKPEDTAVYYCAAAIGSTVDSYDPGDPLEYDYWGQGTQVTVS

SEQ ID NO: 423 - protein, 127 aa, Homo sapiens
MAQVQLVESGGGLVQAGGSLRLSCAASGRTFSTYTMAWFRQAPGKEREFVAAIAWSGAYYADSVKGRFTISRDNAKNTVYLQMNSLKPEDTAVYICAAAIGSTVDSYSPSDPLEYDYWGQGTQVTVS

SEQ ID NO: 424 - protein, 127 aa, Homo sapiens
MAQVQLVESGGGLVQAGGSLRLSCAASGRTFSTYTLGWFRQAPGKEREFVGTITWSGSSTADSVKGRFTISRDNAKNTVYLQMNSLKPEDTAVYYCAAAIGSSVDSDYPSDPLEYDYWGQGTQVTVS

SEQ ID NO: 425 - protein, 127 aa, Homo sapiens
MAQVQLVESGGGLVQAGGSLRLSCAASGRTFSTYTLGWFRQAPGKEREFVGAITWSGSSTADSVKGRFTISRDNAKNTVYLQMNSLKPEDTAVYYCAAAIGSSVDSYYPSDPLEYDYWGQGTQVTVS

SEQ ID NO: 426 - protein, 127 aa, Homo sapiens
MAQVQLVESGGGLVQAGGSLRLSCAASGRTFSTYTLGWFRQAPGKEREFVGAITWSGGTTADSVKGRFSISRDNAKNTVYLQMNSLKPEDTAVYYCAAVIGSTVDSYDPSDPIEYDYWGQGTQVTVS

SEQ ID NO: 427 - protein, 128 aa, Homo sapiens
MAQVQLVESGGGLVQAGGSLRLSCAASGRTFSTYTLGWFRQAPGKEREFVAAITWSSGTYYADSVKGRFTISRDNAKNTVYLQMNSLKPEDTAVYYCAAVIGSTVDTYNPGDPLEYDYWGQGTQVTVS

SEQ ID NO: 428 - protein, 128 aa, Homo sapiens
MAQVQLVESGGGLVQAGGSLRLSCAASGRTFSTYTLGWFRQAPGKEREFVAAITWSAGTYYADSMKGRFTISRDNAKNTVYLQMNSLKPEDTAVYYCAAVIGSTVDTYNPGDPLEYDYWGQGTQVTVS

SEQ ID NO: 429 - protein, 128 aa, Homo sapiens
MAQVQLVESGGGLVQAGGSLRLSCAASGRTFSTYTLGWFRQAPGKEREFVAAINWSSGTYYADSVKGRFTISRDNAKNTVYLQMNSLKPEDTAVYYCAAVIGSTVDTYNPGDPLEYDYWGQGTQVTVS

SEQ ID NO: 430 - protein, 129 aa, Homo sapiens
MAQVQLVESGGGLVQAGGSLRLSCAASGRTFSTYTLGWFRQAPGKEREFVAAINWSGGTTYYADSVKGRFTISRNNAKNTVYLQMNSLKPEDTAVYYCAAVIGSTVDSYDPGDPLEYDYWGQGTQVTVS

SEQ ID NO: 431 - protein, 127 aa, Homo sapiens
MAQVQLVESGGGLVQAGGSLRLSCAASGRTFSTYTLAWFRQAPGKEREFVGAITWSGASTADSVKGRFTISRDNAKNTVYLQMNSLKPEDTAVYYCAAAIGSTVDSYHPSDPLDYDYWGQGTQVTVS

SEQ ID NO: 432 - protein, 127 aa, Homo sapiens
MAQVQLVESGGGLVQAGGSLRLSCAASGRTFSTYSLGWFRQAPGKEREFVGAISWSGSTTADSVKGRFTISRDNAKNTVYLQMNNLKPEDTAVYYCAAAIGSTVDSYNPSDPLEYDYWGQGTQVTVS

SEQ ID NO: 433 - protein, 129 aa, Homo sapiens
MAQVQLVESGGGLVQAGGSLRLSCAASGRTFSTYEMAWFRQAPGKEREFVAAINWSGSSTYYVDSVKGRFTISRDNAKNTVYLQMNSLKPEDTAVYVCAAVIGSTVDEYRPSDPLEYDYWGQGTQVTVS

SEQ ID NO: 434 - protein, 129 aa, Homo sapiens
MAQVQLVESGGGLVQAGGSLRLSCAASGRTFSTYEMAWFRQAPGKEREFVAAINWSGSSTYYADSVKGRFTISRDNAKNTVYLQMNSLKPEDTAVYVCAAVIGSTVDEYRPSDPLEYDYWGQGTQVTVS

SEQ ID NO: 435 - protein, 129 aa, Homo sapiens
MAQVQLVESGGGLVQAGGSLRLSCAASGRTFSSYTMGWFRQAPGLERDFVAEISWNGGSTGYADSVKGRFTISRDNAKNTVYLQMNSLKPQDTAVYYCAAVIGSPTDSSDYRSSLDYDYWGQGTQVTVS

SEQ ID NO: 436 - protein, 124 aa, Homo sapiens
MAQVQLVESGGGLVQAGGSLRLSCAASGRTFSSYTMGWFRQAPGKEREFVAGISWSGLSTYYADSVKGRFTISRDNAKNTVYLQMNSLKLEDTAVYYCVADRSSWPWDYRYLEVWGQGTQVTVS

SEQ ID NO: 437 - protein, 129 aa, Homo sapiens
MAQVQLVESGGGLVQAGGSLRLSCAASGRTFSSYTMGWFHQAPGKEREFVAEISGTGGNTGYSDSVKGRFTISRDNAKNTVYLQMNSLKLEDTAVYYCAAVLGSPTDSSDYRSTLDYDYWGQGTQVTVS

SEQ ID NO: 438 - protein, 129 aa, Homo sapiens
MAQVQLVESGGGLVQAGGSLRLSCAASGRTFSSYTMGWFHQAPGKEREFVAEISGTGGNTGYADSVKGRFTISRDNAKNTVYLQMNTLKPEDTAVYYCAAVIGSPTDSSDYRSSLDYDYWGQGTQVTVS

SEQ ID NO: 439 - protein, 129 aa, Homo sapiens
MAQVQLVESGGGLVQAGGSLRLSCAASGRTFSSYTMGWFHQAPGKEREFVAEISGTGGNTGYADSVKGRFTISRDNAKNTVYLQMNSLKPEDTAAYYCAAVIGSPTDSSDYRSSLDYDYWGQGTQVTVS

SEQ ID NO: 440 - protein, 129 aa, Homo sapiens
MAQVQLVESGGGLVQAGGSLRLSCAASGRTFSSYTMGWFHQAPGKEREFVAEISGTGGNTGYADSVKGRFTISRDNAKNTVYLQMNSLKPEDMAVYYCAAVIGSPTDSSDYRSSLDYDYWGQGTQVTVS

SEQ ID NO: 441 - protein, 129 aa, Homo sapiens
MAQVQLVESGGGLVQAGGSLRLSCAASGRTFSSYTMGWFHQAPGKEREFVAEIGGTGGNTGYADSVKGRFTISRDNAKNMVYLQMNSLKPEDTAVYYCAAVIGSPTDSSDYRSSLDYDYWGQGTQVTVS

SEQ ID NO: 442 - protein, 129 aa, Homo sapiens
MAQVQLVESGGGLVQAGGSLRLSCAASGRTFSSYTMGWFHQAPGKERDFVAEISGTGGNIGYADSVKGRFTISRDNAKNTVYLQMNSLKPEDTAIYYCAAVIGSPTDSSDYRSSLDYDYWGQGTQVTVS

SEQ ID NO: 443 - protein, 129 aa, Homo sapiens
MAQVQLVESGGGLVQAGGSLRLSCAASGRTFSSYTMGWFHQAPGKECEFVAEISGTGGNTGYADSVKGRFTISRDNAKNTVYLQMNSLKPEDTAVYYCAAVIGSPTDSSDYRSSLDYDYWGQGTQVTVS

SEQ ID NO: 444 - protein, 130 aa, Homo sapiens
MAQVQLVESGGGLVQAGGSLRLSCAASGRTFSSYAMAWFRQAPGKDREFVAAVSRSGTNLYYADSVKGRFTISRDNAKNTVFLQMNSLKPEDTAVYYCAARGGGSSVDSEYDVGEFEYDYWGQGTQVTVS

SEQ ID NO: 445 - protein, 132 aa, Homo sapiens
MAQVQLVESGGGLVQAGGSLRLSCAASGRTFSSLRMAWFRQAPGKEREFVAENWWNGQGGQGVWYVDSVKGRFTISRDNAKNTLYLQMNNLKPEDTAVYYCAAHRDDSGSTVDPPNQSDYDYWGQGTQVTVS

SEQ ID NO: 446 - protein, 130 aa, Homo sapiens
MAQVQLVESGGGLVQAGGSLRLSCAASGRTFSSLDMGWFRQRPGKERDVVATINWTGDSTYYLDSVKGRFTISRDNAKNTVFLQMNSLKPEDTAVYYCAARGGGSSVDSEYDVGEFEYDYWGQGTQVTVS

SEQ ID NO: 447 - protein, 130 aa, Homo sapiens
MAQVQLVESGGGLVQAGGSLRLSCAASGRTFSSLDMGWFRQAPGKERDIVATISWTGGSTYYADSVKGRFTISRDNAKNTVYLQMNSLKPEDTAVYYCAARGGGTSVDSDYDVGEFEYDYWGQGTQVTVS

SEQ ID NO: 448 - protein, 129 aa, Homo sapiens
MAQVQLVESGGGLVQAGGSLRLSCAASGRTFSRYTMGWFHQAPGKEREFVAEISGTGGNTGYADSVKGRFTMSRDNAKNTVYLQMNSLKPEDTGVYYCAAVIGSPTDSSDYRSSLDYDYWGQGTQVTVS

SEQ ID NO: 449 - protein, 119 aa, Homo sapiens
MAQVQLVESGGGLVQAGGSLRLSCAASGRTFSRVGWFHQPAPEKRREVVAAISWRSGDTYYTHFVEGRFTISRDNAKNTVYLQMNSLTPEDTAVYYCAASDKSTGPYEYWGQGTQVTVS

SEQ ID NO: 450 - protein, 119 aa, Homo sapiens
MAQVQLVESGGGLVQAGGSLRLSCAASGRTFSRVGWFHQPAPEKRREVVAAISWRSGDTYYTHFVEGRFTISRDNAKNMVYLQMNSLTPEDTAVYYCAASDKSTGPYEYWGQGTQVTVS

SEQ ID NO: 451 - protein, 126 aa, Homo sapiens
MAQVQLVESGGGLVQAGGSLRLSCAASGRTFSDYTMGWFRRAPGKEREFVATISTGGGSTKYADSVKGRFTISRDNTKNMVYLQMNSLKPEDTAVYYCAASLRGYYSGSYSREYDYWGQGTQVTVS

SEQ ID NO: 452 - protein, 126 aa, Homo sapiens
MAQVQLVESGGGLVQAGGSLRLSCAASGRTFSDYTMGWFRRAPGKEREFVATISTGGGSTKYADSVKGRFTISRDNAKNMVYLQMNSLKPEDTAVYYCAASHRGYYSGSYSREYDNWGQGTQVTVS

SEQ ID NO: 453 - protein, 126 aa, Homo sapiens
MAQVQLVESGGGLVQAGGSLRLSCAASGRTFSDYTMGWFRRAPGKEREFVATISTGGGSTKYADSVKGRFTISRDNAKNMVYLQMNSLKPEDTAVYYCAASHRGYYSGSYSREYDDWGQGTQVTVS

SEQ ID NO: 454 - protein, 126 aa, Homo sapiens
MAQVQLVESGGGLVQAGGSLRLSCAASGRTFSDWTMGWFRRAPGKEREFVATISTGGGSTKYADSVKGRFTISRDNAKNMVYLQMNSLKPEDTAVYYCAASHRGYYSGSYSREYDNWGQGTQVTVS

SEQ ID NO: 455 - protein, 129 aa, Homo sapiens
MAQVQLVESGGGLVQAGGSLRLSCAASGRTFRYYSMGWFRQAPGKEREFVSAISWSGDSTYYGDSVKGRFTISRDNAKNTVYLQMDSLKPEDTAVYYCAGAFGSTVDNYDPSDPREYDTWGQGTQVTVS

SEQ ID NO: 456 - protein, 126 aa, Homo sapiens
MAQVQLVESGGGLVQAGGSLRLSCAASGRTFRSYTMGWFRQAPGKEREFVAAISWSGGSTYYADSVKGRFTISRDNTKTTVYLQMNSLKPEDTAVYYCAASKYYSGNYYSQVRYDYWGQGTQVTVS

SEQ ID NO: 457 - protein, 126 aa, Homo sapiens
MAQVQLVESGGGLVQAGGSLRLSCAASGRTFRSYTMGWFRQAPGKEREFVAAISWSGGSTYYADSVKGRFTISRDNAKTTVYLQMNSLKPEDTAVYYCAASKYYSGNYYSQVRYDYWGQGTQVTVS

SEQ ID NO: 458 - protein, 134 aa, Homo sapiens
MAQVQLVESGGGLVQAGGSLRLSCAASGRTFGMSTMGWFRQAPGKERELVSTISIIWRDGRTQSGGRTHYADSVKGRFTISRDDAKNTVYLQMDSLKPEDTALYYCAARFGSSVDVIIPDDYDYWGQGTQVTVS

SEQ ID NO: 459 - protein, 134 aa, Homo sapiens
MAQVQLVESGGGLVQAGGSLRLSCAASGRTFGMSTMGWFRQAPGKERELVSTISIIWRDGRTQSGGRTHYADSVKGRFTISRDDAKNTVYLQMDSLKPEDTAFYYCAARFGSSVDVIIPDDYDYWGQGTQVTVS

SEQ ID NO: 460 - protein, 125 aa, Homo sapiens
MAQVQLVESGGGLVQAGGSLRLSCAASGRSFSSYSMGWFRQAPGKDREFVAAITARGMNPYYTDSVKGRFIISRDNAKNALYLQMNSLKREDTAVYYCVGRFRGDWGTQDAKWDYWGQGTQVTVS

SEQ ID NO: 461 - protein, 126 aa, Homo sapiens
MAQVQLVESGGGLVQAGGSLRLSCAASGRSFSSYDMGWFRRAPGKEREFVAAISGSRGSTDYSDSVKGRFTISRDNAKNTVYLQMNRLKPEDTAVYYCAAGFGSVDGLEYPISYDDWGQGTQVTVS

SEQ ID NO: 462 - protein, 126 aa, Homo sapiens
MAQVQLVESGGGLVQAGGSLRLSCAASGRSFSSLDMGWFRRAPGKEREFVAAISGSRGSTDYSDSVKGRFTISRDNAKNTVYLQMNRLKPEDAAVYYCAAGFGSVDGLEYPISYDDWGQGTQVTVS

SEQ ID NO: 463 - protein, 127 aa, Homo sapiens
MAQVQLVESGGGLVQAGGSLRLSCAASGRSFDRYTMAWFRQGPGKEREFVATVGWNDNSIYYADSVKGRFTISRDNAKNTVYLQMNSLKPEDTAVYYCAATFGSPVDTPLDRGAYDFWGQGTQVTVS

SEQ ID NO: 464 - protein, 130 aa, Homo sapiens
MAQVQLVESGGGLVQAGGSLRLSCAASGRPFSSVDMGWFRQAPGKEREFVATISWTGGSTYYADSVKGRFTISRDNAKNTVYLQMNSLKPEDTAVYYCAARGGGTSVDSDYDVEEFEYDYWGQGTQVTVS

SEQ ID NO: 465 - protein, 130 aa, Homo sapiens
MAQVQLVESGGGLVQAGGSLRLSCAASGRPFSSSDMGWFRQRPGKERDVVATINWTGDSTYYLDSVKGRFTISRDNAKNTVFLQMNSLKPEDTAVYYCAARGGGSSVDSEYDVGEFEYDYWGQGTQVTVS

SEQ ID NO: 466 - protein, 130 aa, Homo sapiens
MAQVQLVESGGGLVQAGGSLRLSCAASGRPFSSSDMGWFRQAPGKEREFVATISWTGGSTYYADSVKGRFTISRDNAKNTVYLQMNSLKPEDTAVYYCAARGGGTSVDSDYDVEEFEYDYWGQGTQVTVS

SEQ ID NO: 467 - protein, 130 aa, Homo sapiens
MAQVQLVESGGGLVQAGGSLRLSCAASGRPFSSLNMGWFRQAPGKEREFVATISWTGGSTYYADSVKGRFTISRDNAKNTVYLQMNSLKPEDTAVYYCAARGGGTSVDSDYDVEEFEYDYWGQGTQVTVS

SEQ ID NO: 468 - protein, 130 aa, Homo sapiens
MAQVQLVESGGGLVQAGGSLRLSCAASGRPFSSLGMGWFRQRPGKERDVVATINWTGDSTYYLDSVKGRFTISRDNAKNTVFLQMNSLKPEDTAVYYCAARGGGSSVDSEYDVGEFEYDYWGQGTQVTVS

SEQ ID NO: 469 - protein, 130 aa, Homo sapiens
MAQVQLVESGGGLVQAGGSLRLSCAASGRPFSSLDMSWFRQRPGKERDVVATINWTGDSTYYLDSVKGRFTISRDNAKNTVFLQMNSLKPEDTAVYYCAARGGGSSVDSEYDVGEFEYDYWGQGTQVTVS

SEQ ID NO: 470 - protein, 130 aa, Homo sapiens
MAQVQLVESGGGLVQAGGSLRLSCAASGRPFSSLDMGWYRQRPGKERDVVATINWTGDSTYYLDSVKGRFTISRDNAKNTVFLQMNSLKPEDTAVYYCAARGGGSSVDSEYDVGEFEYDYWGQGTQVTVS

SEQ ID NO: 471 - protein, 130 aa, Homo sapiens
MAQVQLVESGGGLVQAGGSLRLSCAASGRPFSSLDMGWLRQRPGKERDVVATINWTGDSTYYLDSVKGRFTISRDNAKNTVFLQMNSLKPEDTAVYYCAARGGGSSVDSEYDVGEFEYDYWGQGTQVTVS

SEQ ID NO: 472 - protein, 130 aa, Homo sapiens
MAQVQLVESGGGLVQAGGSLRLSCAASGRPFSSLDMGWFRQTPGKEREFVAAITWTGGSTYYTDSVKGRFTISRDNAKNTVYLQMNSLKPEDTAVYYCAARGGGTSVDNDYDVGEFEYDYWGQGTQVTVS

SEQ ID NO: 473 - protein, 130 aa, Homo sapiens
MAQVQLVESGGGLVQAGGSLRLSCAASGRPFSSLDMGWFRQRPGKERDVVATINWTSDSTYYLDSVKGRFTISRDNAKNTVFLQMNSLKPEDTAVYYCAARGGGSSVDSEYDVGEFEYDYWGQGTQVTVS

SEQ ID NO: 474 - protein, 130 aa, Homo sapiens
MAQVQLVESGGGLVQAGGSLRLSCAASGRPFSSLDMGWFRQRPGKERDVVATINWTGNSTYYLDSVKGRFTISRDNAKNTVFLQMNSLKPEDTAVYYCAARGGGSSVDSEYDVGEFEYDYWGQGTQVTVS

SEQ ID NO: 475 - protein, 130 aa, Homo sapiens
MAQVQLVESGGGLVQAGGSLRLSCAASGRPFSSLDMGWFRQRPGKERDVVATINWTGESTYYLDSVKGRFTISRDNAKNTVFLQMNSLKPEDTAVYYCAARGGGSSVDSEYDVGEFEYDYWGQGTQVTVS

SEQ ID NO: 476 - protein, 130 aa, Homo sapiens
MAQVQLVESGGGLVQAGGSLRLSCAASGRPFSSLDMGWFRQRPGKERDVVATINWTGDYTYYLDSVKGRFTISRDNAKNTVFLQMNSLKPEDTAVYYCAARGGGSSVDSEYDVGEFEYDYWGQGTQVTVS

SEQ ID NO: 477 - protein, 130 aa, Homo sapiens
MAQVQLVESGGGLVQAGGSLRLSCAASGRPFSSLDMGWFRQRPGKERDVVATINWTGDYTYYLDSVKGRFTISRDNAKNTVFLQMNSLKPEDTAIYYCAARGGGSSVDSEYDVGEFEYDYWGQGTQVTVS

SEQ ID NO: 478 - protein, 130 aa, Homo sapiens
MAQVQLVESGGGLVQAGGSLRLSCAASGRPFSSLDMGWFRQRPGKERDVVATINWTGDSTYYSDSVKGRFTISRDNAKNTVFLQMNSLKPEDTAVYYCAARGGGSSVDSEYDVGEFEYDYWGQGTQVTVS

SEQ ID NO: 479 - protein, 130 aa, Homo sapiens
MAQVQLVESGGGLVQAGGSLRLSCAASGRPFSSLDMGWFRQRPGKERDVVATINWTGDSTYYLDYVKGRFTISRDNAKNTVFLQMNSLKPEDTAVYYCAARGGGSSVDSEYDVGEFEYDYWGQGTQVTVS

SEQ ID NO: 480 - protein, 130 aa, Homo sapiens
MAQVQLVESGGGLVQAGGSLRLSCAASGRPFSSLDMGWFRQRPGKERDVVATINWTGDSTYYLDSVNGRFTISRDNAKNTVFLQMNSLKPEDTAVYYCAARGGGSSVDSEYDVGEFEYDYWGQGTQVTVS

SEQ ID NO: 481 - protein, 130 aa, Homo sapiens
MAQVQLVESGGGLVQAGGSLRLSCAASGRPFSSLDMGWFRQRPGKERDVVATINWTGDSTYYLDSVKGRFTISRNNAKNTVFLQMNSLKPEDTAVYYCAARGGGSSVDSEYDVGEFEYDYWGQGTQVTVS

SEQ ID NO: 482 - protein, 130 aa, Homo sapiens
MAQVQLVESGGGLVQAGGSLRLSCAASGRPFSSLDMGWFRQRPGKERDVVATINWTGDSTYYLDSVKGRFTISRDYAKNTVFLQMNSLKPEDTAVYYCAARGGGSSVDSEYDVGEFEYDYWGQGTQVTVS

SEQ ID NO: 483 - protein, 130 aa, Homo sapiens
MAQVQLVESGGGLVQAGGSLRLSCAASGRPFSSLDMGWFRQRPGKERDVVATINWTGDSTYYLDSVKGRFTISRDSAKNTVFLQMNSLKPEDTAVYYCAARGGGSSVDSEYDVGEFEYDYWGQGTQVTVS

SEQ ID NO: 484 - protein, 130 aa, Homo sapiens
MAQVQLVESGGGLVQAGGSLRLSCAASGRPFSSLDMGWFRQRPGKERDVVATINWTGDSTYYLDSVKGRFTISRDNVKNTVFLQMNSLKPEDTAVYYCAARGGGSSVDSEYDVGEFEYDYWGQGTQVTVS

SEQ ID NO: 485 - protein, 130 aa, Homo sapiens
MAQVQLVESGGGLVQAGGSLRLSCAASGRPFSSLDMGWFRQRPGKERDVVATINWTGDSTYYLDSVKGRFTISRDNTKNTVFLQMNSLKPEDTAVYYCAARGGGSSVDSEYDVGEFEYDYWGQGTQVTVS

SEQ ID NO: 486 - protein, 130 aa, Homo sapiens
MAQVQLVESGGGLVQAGGSLRLSCAASGRPFSSLDMGWFRQRPGKERDVVATINWTGDSTYYLDSVKGRFTISRDNAKYTVFLQMNSLKPEDTAVYYCAARGGGSSVDSEYDVGEFEYDYWGQGTQVTVS

SEQ ID NO: 487 - protein, 130 aa, Homo sapiens
MAQVQLVESGGGLVQAGGSLRLSCAASGRPFSSLDMGWFRQRPGKERDVVATINWTGDSTYYLDSVKGRFTISRDNAKNTVYLQMNSLKPEDTAVYYCAARGGGSSVDSEYDVGEFEYDYWGQGTQVTVS

SEQ ID NO: 488 - protein, 130 aa, Homo sapiens
MAQVQLVESGGGLVQAGGSLRLSCAASGRPFSSLDMGWFRQRPGKERDVVATINWTGDSTYYLDSVKGRFTISRDNAKNTVLLQMNSLKPEDTAVYYCAARGGGSSVDSEYDVGEFEYDYWGQGTQVTVS

SEQ ID NO: 489 - protein, 130 aa, Homo sapiens
MAQVQLVESGGGLVQAGGSLRLSCAASGRPFSSLDMGWFRQRPGKERDVVATINWTGDSTYYLDSVKGRFTISRDNAKNTVILQMNSLKPEDTAVYYCAARGGGSSVDSEYDVGEFEYDYWGQGTQVTVS

SEQ ID NO: 490 - protein, 130 aa, Homo sapiens
MAQVQLVESGGGLVQAGGSLRLSCAASGRPFSSLDMGWFRQRPGKERDVVATINWTGDSTYYLDSVKGRFTISRDNAKNTVFQQMNSLKPEDTAVYYCAARGGGSSVDSEYDVGEFEYDYWGQGTQVTVS

SEQ ID NO: 491 - protein, 130 aa, Homo sapiens
MAQVQLVESGGGLVQAGGSLRLSCAASGRPFSSLDMGWFRQRPGKERDVVATINWTGDSTYYLDSVKGRFTISRDNAKNTVFPQMNSLKPEDTAVYYCAARGGGSSVDSEYDVGEFEYDYWGQGTQVTVS

SEQ ID NO: 492 - protein, 130 aa, Homo sapiens
MAQVQLVESGGGLVQAGGSLRLSCAASGRPFSSLDMGWFRQRPGKERDVVATINWTGDSTYYLDSVKGRFTISRDNAKNTVFLRMNSLKPEDTAVYYCAARGGGSSVDSEYDVGEFEYDYWGQGTQVTVS

SEQ ID NO: 493 - protein, 130 aa, Homo sapiens
MAQVQLVESGGGLVQAGGSLRLSCAASGRPFSSLDMGWFRQRPGKERDVVATINWTGDSTYYLDSVKGRFTISRDNAKNTVFLQTNSLKPEDTAVYYCAARGGGSSVDSEYDVGEFEYDYWGQGTQVTVS

SEQ ID NO: 494 - protein, 130 aa, Homo sapiens
MAQVQLVESGGGLVQAGGSLRLSCAASGRPFSSLDMGWFRQRPGKERDVVATINWTGDSTYYLDSVKGRFTISRDNAKNTVFLQMYSLKPEDTAVYYCAARGGGSSVDSEYDVGEFEYDYWGQGTQVTVS

SEQ ID NO: 495 - protein, 130 aa, Homo sapiens
MAQVQLVESGGGLVQAGGSLRLSCAASGRPFSSLDMGWFRQRPGKERDVVATINWTGDSTYYLDSVKGRFTISRDNAKNTVFLQMNSQKPEDTAVYYCAARGGGSSVDSEYDVGEFEYDYWGQGTQVTVS

SEQ ID NO: 496 - protein, 130 aa, Homo sapiens
MAQVQLVESGGGLVQAGGSLRLSCAASGRPFSSLDMGWFRQRPGKERDVVATINWTGDSTYYLDSVKGRFTISRDNAKNTVFLQMNSPKPEDTAVYYCAARGGGSSVDSEYDVGEFEYDYWGQGTQVTVS

SEQ ID NO: 497 - protein, 130 aa, Homo sapiens
MAQVQLVESGGGLVQAGGSLRLSCAASGRPFSSLDMGWFRQRPGKERDVVATINWTGDSTYYLDSVKGRFTISRDNAKNTVFLQMNSMKPEDTAVYYCAARGGGSSVDSEYDVGEFEYDYWGQGTQVTVS

SEQ ID NO: 498 - protein, 130 aa, Homo sapiens
MAQVQLVESGGGLVQAGGSLRLSCAASGRPFSSLDMGWFRQRPGKERDVVATINWTGDSTYYLDSVKGRFTISRDNAKNTVFLQMNSLRPEDTAVYYCAARGGGSSVDSEYDVGEFEYDYWGQGTQVTVS

SEQ ID NO: 499 - protein, 130 aa, Homo sapiens
MAQVQLVESGGGLVQAGGSLRLSCAASGRPFSSLDMGWFRQRPGKERDVVATINWTGDSTYYLDSVKGRFTISRDNAKNTVFLQMNSLKTEDTAVYYCAARGGGSSVDSEYDVGEFEYDYWGQGTQVTVS

SEQ ID NO: 500 - protein, 130 aa, Homo sapiens
MAQVQLVESGGGLVQAGGSLRLSCAASGRPFSSLDMGWFRQRPGKERDVVATINWTGDSTYYLDSVKGRFTISRDNAKNTVFLQMNSLKPKDTAVYYCAARGGGSSVDSEYDVGEFEYDYWGQGTQVTVS

SEQ ID NO: 501 - protein, 130 aa, Homo sapiens
MAQVQLVESGGGLVQAGGSLRLSCAASGRPFSSLDMGWFRQRPGKERDVVATINWTGDSTYYLDSVKGRFTISRDNAKNTVFLQMNSLKPGDTAVYYCAARGGGSSVDSEYDVGEFEYDYWGQGTQVTVS

SEQ ID NO: 502 - protein, 130 aa, Homo sapiens
MAQVQLVESGGGLVQAGGSLRLSCAASGRPFSSLDMGWFRQRPGKERDVVATINWTGDSTYYLDSVKGRFTISRDNAKNTVFLQMNSLKPEVTAVYYCAARGGGSSVDSEYDVGEFEYDYWGQGTQVTVS

SEQ ID NO: 503 - protein, 130 aa, Homo sapiens
MAQVQLVESGGGLVQAGGSLRLSCAASGRPFSSLDMGWFRQRPGKERDVVATINWTGDSTYYLDSVKGRFTISRDNAKNTVFLQMNSLKPEDTVVYYCAARGGGSSVDSEYDVGEFEYDYWGQGTQVTVS

SEQ ID NO: 504 - protein, 130 aa, Homo sapiens
MAQVQLVESGGGLVQAGGSLRLSCAASGRPFSSLDMGWFRQRPGKERDVVATINWTGDSTYYLDSVKGRFTISRDNAKNTVFLQMNSLKPEDTTVYYCAARGGGSSVDSEYDVGEFEYDYWGQGTQVTVS

SEQ ID NO: 505 - protein, 130 aa, Homo sapiens
MAQVQLVESGGGLVQAGGSLRLSCAASGRPFSSLDMGWFRQRPGKERDVVATINWTGDSTYYLDSVKGRFTISRDNAKNTVFLQMNSLKPEDTDVYYCAARGGGSSVDSEYDVGEFEYDYWGQGTQVTVS

SEQ ID NO: 506 - protein, 130 aa, Homo sapiens
MAQVQLVESGGGLVQAGGSLRLSCAASGRPFSSLDMGWFRQRPGKERDVVATINWTGDSTYYLDSVKGRFTISRDNAKNTVFLQMNSLKPEDTAVYYCAARGGGSSVDSEYDVGEFGYDYWGQGTQVTVS

SEQ ID NO: 507 - protein, 130 aa, Homo sapiens
MAQVQLVESGGGLVQAGGSLRLSCAASGRPFSSLDMGWFRQRPGKERDVVATINWTGDSTYYLDSVKGRFTISRDNAKNTVFLQMNSLKPEDTAVYYCAARGGGSSVDSEYDVGEFEYVYWGQGTQVTVS

SEQ ID NO: 508 - protein, 130 aa, Homo sapiens
MAQVQLVESGGGLVQAGGSLRLSCAASGRPFSSLDMGWFRQRPGKERDVVATINWTGDSTYYLDSVKGRFTISRDNAKNTVFLQMNSLKPEDTAVYYCAARGGGSSVDSEYDVGEFEYGYWGQGTQVTVS

SEQ ID NO: 509 - protein, 130 aa, Homo sapiens
MAQVQLVESGGGLVQAGGSLRLSCAASGRPFSSLDMGWFRQRPGKERDVVATINWTGDSTYYLDSVKGRFTISRDNAKNTVFLQMNSLKPEDTAVYYCAARGGGSSVDSEYDVGEFEYEYWGQGTQVTVS

SEQ ID NO: 510 - protein, 130 aa, Homo sapiens
MAQVQLVESGGGLVQAGGSLRLSCAASGRPFSSLDMGWFRQRPGKERDVVATINWTGDSTYYLDSVKGRFTISRDNAKNTVFLQMNSLKPEDTAVYYCAARGGGSSVDSEYDVGEFEYDYWVQGTQVTVS

SEQ ID NO: 511 - protein, 130 aa, Homo sapiens
MAQVQLVESGGGLVQAGGSLRLSCAASGRPFSSLDMGWFRQRPGKERDVVATINWTGDSTYYLDSVKGRFTISRDNAKNTVFLQMNSLKPEDTAVYYCAARGGGSSVDSEYDVGEFEYDYWGRGTQVTVS

SEQ ID NO: 512 - protein, 130 aa, Homo sapiens
MAQVQLVESGGGLVQAGGSLRLSCAASGRPFSSLDMGWFRQRPGKERDVVATINWTGDSTYYLDSVKGRFTISRDNAKNTVFLQMNSLKPEDTAVYYCAARGGGSSVDSEYDVGEFEYDYWGQRTQVTVS

SEQ ID NO: 513 - protein, 130 aa, Homo sapiens
MAQVQLVESGGGLVQAGGSLRLSCAASGRPFSSLDMGWFRQRPGKERDVVATINWTGDSTYYLDSVKGRFTISRDNAKNTVFLQMNSLKPEDTAVYYCAARGGGSSVDSEYDVGEFEYDYWGQGTQVTVS

SEQ ID NO: 514 - protein, 129 aa, Homo sapiens
MAQVQLVESGGGLVQAGGSLRLSCAASGRPFSSLDMGWFRQRPGKERDVVATINWTGDSTYYLDSVKGRFTISRDNAKNTVFLQMNSLKPEDTAVYYCAARGGGSSVDSEYDVGEFEYDYWGQGPRSPS

SEQ ID NO: 515 - protein, 130 aa, Homo sapiens
MAQVQLVESGGGLVQAGGSLRLSCAASGRPFSSLDMGWFRQRPGKERDVVATINWTGDSTYYLDSVKGRFTISRDNAKNTVFLQMNSLKPEDTAVYYCAARGGGSSVDSEYDVGEFEYDYWGLGTQVTVS

SEQ ID NO: 516 - protein, 130 aa, Homo sapiens
MAQVQLVESGGGLVQAGGSLRLSCAASGRPFSSLDMGWFRQRPGKERDVVATINWTGDSTYYLDSVKGRFTISRDNAKNTVFLQMNSLKPEDTAVYYCAARGGGSSVDSEYDVGEFEYDYWGHGTQVTVS

SEQ ID NO: 517 - protein, 130 aa, Homo sapiens
MAQVQLVESGGGLVQAGGSLRLSCAASGRPFSSLDMGWFRQRPGKERDVVATINWTGDSTYYLDSVKGRFTISRDNAKNTVFLQMNSLKPEDTAVYYCAARGGGSSVDSEYDVGEFEYDYWDQGTQVTVS

SEQ ID NO: 518 - protein, 130 aa, Homo sapiens
MAQVQLVESGGGLVQAGGSLRLSCAASGRPFSSLDMGWFRQRPGKERDVVATINWTGDSTYYLDSVKGRFTISRDNAKNTVFLQMNSLKPEDTAVYYCAARGGGSSVDSEYDVGEFEYDYWCQGTQVTVS

SEQ ID NO: 519 - protein, 130 aa, Homo sapiens
MAQVQLVESGGGLVQAGGSLRLSCAASGRPFSSLDMGWFRQRPGKERDVVATINWTGDSTYYLDSVKGRFTISRDNAKNTVFLQMNSLKPEDTAVYYCAARGGGSSVDSEYDVGEFEYDYRGQGTQVTVS

SEQ ID NO: 520 - protein, 130 aa, Homo sapiens
MAQVQLVESGGGLVQAGGSLRLSCAASGRPFSSLDMGWFRQRPGKERDVVATINWTGDSTYYLDSVKGRFTISRDNAKNTVFLQMNSLKPEDTAVYYCAARGGGSSVDSEYDVGEFEYDYGGQGTQVTVS

SEQ ID NO: 521 - protein, 130 aa, Homo sapiens
MAQVQLVESGGGLVQAGGSLRLSCAASGRPFSSLDMGWFRQRPGKERDVVATINWTGDSTYYLDSVKGRFTISRDNAKNTVFLQMNSLKPEDTAVYYCAARGGGSSVDSEYDVGEFEYDYCGQGTQVTVS

SEQ ID NO: 522 - protein, 130 aa, Homo sapiens
MAQVQLVESGGGLVQAGGSLRLSCAASGRPFSSLDMGWFRQRPGKERDVVATINWTGDSTYYLDSVKGRFTISRDNAKNTVFLQMNSLKPEDTAVYYCAARGGGSSVDSEYDVGEFEYDHWGQGTQVTVS

SEQ ID NO: 523 - protein, 130 aa, Homo sapiens
MAQVQLVESGGGLVQAGGSLRLSCAASGRPFSSLDMGWFRQRPGKERDVVATINWTGDSTYYLDSVKGRFTISRDNAKNTVFLQMNSLKPEDTAVYYCAARGGGSSVDSEYDVGEFEYDDWGQGTQVTVS

SEQ ID NO: 524 - protein, 130 aa, Homo sapiens
MAQVQLVESGGGLVQAGGSLRLSCAASGRPFSSLDMGWFRQRPGKERDVVATINWTGDSTYYLDSVKGRFTISRDNAKNTVFLQMNSLKPEDTAVYYCAARGGGSSVDSEYDVGEFEYAYWGQGTQVTVS

SEQ ID NO: 525 - protein, 130 aa, Homo sapiens
MAQVQLVESGGGLVQAGGSLRLSCAASGRPFSSLDMGWFRQRPGKERDVVATINWTGDSTYYLDSVKGRFTISRDNAKNTVFLQMNSLKPEDTAVYYCAARGGGSSVDSEYDVGEFEHDYWGQGTQVTVS

SEQ ID NO: 526 - protein, 130 aa, Homo sapiens
MAQVQLVESGGGLVQAGGSLRLSCAASGRPFSSLDMGWFRQRPGKERDVVATINWTGDSTYYLDSVKGRFTISRDNAKNTVFLQMNSLKPEDTAVYYCAARGGGSSVDSEYDVGEFECDYWGQGTQVTVS

SEQ ID NO: 527 - protein, 130 aa, Homo sapiens
MAQVQLVESGGGLVQAGGSLRLSCAASGRPFSSLDMGWFRQRPGKERDVVATINWTGDSTYYLDSVKGRFTISRDNAKNTVFLQMNSLKPEDTAVYYCAARGGGSSVDSEYDVGEFAYDYWGQGTQVTVS

SEQ ID NO: 528 - protein, 130 aa, Homo sapiens
MAQVQLVESGGGLVQAGGSLRLSCAASGRPFSSLDMGWFRQRPGKERDVVATINWTGDSTYYLDSVKGRFTISRDNAKNTVFLQMNSLKPEDTAIYYCAARGGGSSVDSEYDVGEFEYDYWGQGTQVTVS

SEQ ID NO: 529 - protein, 130 aa, Homo sapiens
MAQVQLVESGGGLVQAGGSLRLSCAASGRPFSSLDMGWFRQRPGKERDVVATINWTGDSTYYLDSVKGRFTISRDNAKNTVFLQMNSLKPEDMAVYYCAARGGGSSVDSEYDVGEFEYDYWGQGTQVTVS

SEQ ID NO: 530 - protein, 130 aa, Homo sapiens
MAQVQLVESGGGLVQAGGSLRLSCAASGRPFSSLDMGWFRQRPGKERDVVATINWTGDSTYYLDSVKGRFTISRDNAKNTVFLQMNSLKPEDAAVYYCAARGGGSSVDSEYDVGEFEYDYWGQGTQVTVS

SEQ ID NO: 531 - protein, 130 aa, Homo sapiens
MAQVQLVESGGGLVQAGGSLRLSCAASGRPFSSLDMGWFRQRPGKERDVVATINWTGDSTYYLDSVKGRFTISRDNAKNTVFLQMNSLKPDDTAVYYCAARGGGSSVDSEYDVGEFEYDYWGQGTQVTVS

SEQ ID NO: 532 - protein, 130 aa, Homo sapiens
MAQVQLVESGGGLVQAGGSLRLSCAASGRPFSSLDMGWFRQRPGKERDVVATINWTGDSTYYLDSVKGRFTISRDNAKNTVFLQMNRLKPEDTAVYYCAARGGGSSVDSEYDVGEFEYDYWGQGTQVTVS

SEQ ID NO: 533 - protein, 130 aa, Homo sapiens
MAQVQLVESGGGLVQAGGSLRLSCAASGRPFSSLDMGWFRQRPGKERDVVATINWTGDSTYYLDSVKGRFTISRDNAKNTVFLQMDSLKPEDTAVYYCAARGGGSSVDSEYDVGEFEYDYWGQGTQVTVS

SEQ ID NO: 534 - protein, 130 aa, Homo sapiens
MAQVQLVESGGGLVQAGGSLRLSCAASGRPFSSLDMGWFRQRPGKERDVVATINWTGDSTYYLDSVKGRFTISRDNAKNTVFLQINSLKPEDTAVYYCAARGGGSSVDSEYDVGEFEYDYWGQGTQVTVS

SEQ ID NO: 535 - protein, 130 aa, Homo sapiens
MAQVQLVESGGGLVQAGGSLRLSCAASGRPFSSLDMGWFRQRPGKERDVVATINWTGDSTYYLDSVKGRFTISRDNAKNTMFLQMNSLKPEDTAVYYCAARGGGSSVDSEYDVGEFEYDYWGQGTQVTVS

SEQ ID NO: 536 - protein, 130 aa, Homo sapiens
MAQVQLVESGGGLVQAGGSLRLSCAASGRPFSSLDMGWFRQRPGKERDVVATINWTGDSTYYLDSVKGRFTISRDNAKNMVFLQMNSLKPEDTAVYYCAARGGGSSVDSEYDVGEFEYDYWGQGTQVTVS

SEQ ID NO: 537 - protein, 130 aa, Homo sapiens
MAQVQLVESGGGLVQAGGSLRLSCAASGRPFSSLDMGWFRQRPGKERDVVATINWTGDSTYYLDSVKGRFTISRDNAENTVFLQMNSLKPEDTAVYYCAARGGGSSVDSEYDVGEFEYDYWGQGTQVTVS

SEQ ID NO: 538 - protein, 130 aa, Homo sapiens
MAQVQLVESGGGLVQAGGSLRLSCAASGRPFSSLDMGWFRQRPGKERDVVATINWTGDSTYYLDSVKGRFTISRDDAKNTVFLQMNSLKPEDTAVYYCAARGGGSSVDSEYDVGEFEYDYWGQGTQVTVS

SEQ ID NO: 539 - protein, 130 aa, Homo sapiens
MAQVQLVESGGGLVQAGGSLRLSCAASGRPFSSLDMGWFRQRPGKERDVVATINWTGDSTYYLDSVKGRFTISGDNAKNTVFLQMNSLKPEDTAVYYCAARGGGSSVDSEYDVGEFEYDYWGQGTQVTVS

SEQ ID NO: 540 - protein, 130 aa, Homo sapiens
MAQVQLVESGGGLVQAGGSLRLSCAASGRPFSSLDMGWFRQRPGKERDVVATINWTGDSTYYLDSVKGRFTIPRDNAKNTVFLQMNSLKPEDTAVYYCAARGGGSSVDSEYDVGEFEYDYWGQGTQVTVS

SEQ ID NO: 541 - protein, 130 aa, Homo sapiens
MAQVQLVESGGGLVQAGGSLRLSCAASGRPFSSLDMGWFRQRPGKERDVVATINWTGDSTYYLDSVKGRFTIARDNAKNTVFLQMNSLKPEDTAVYYCAARGGGSSVDSEYDVGEFEYDYWGQGTQVTVS

SEQ ID NO: 542 - protein, 130 aa, Homo sapiens
MAQVQLVESGGGLVQAGGSLRLSCAASGRPFSSLDMGWFRQRPGKERDVVATINWTGDSTYYLDSVKGRFIISRDNAKNTVFLQMNSLKPEDTAVYYCAARGGGSSVDSEYDVGEFEYDYWGQGTQVTVS

SEQ ID NO: 543 - protein, 130 aa, Homo sapiens
MAQVQLVESGGGLVQAGGSLRLSCAASGRPFSSLDMGWFRQRPGKERDVVATINWTGDSTYYLDSVKGRFAISRDNAKNTVFLQMNSLKPEDTAVYYCAARGGGSSVDSEYDVGEFEYDYWGQGTQVTVS

SEQ ID NO: 544 - protein, 130 aa, Homo sapiens
MAQVQLVESGGGLVQAGGSLRLSCAASGRPFSSLDMGWFRQRPGKERDVVATINWTGDSTYYLDSVKGQFTISRDNAKNTVFLQMNSLKPEDTAVYYCAARGGGSSVDSEYDVGEFEYDYWGQGTQVTVS

SEQ ID NO: 545 - protein, 130 aa, Homo sapiens
MAQVQLVESGGGLVQAGGSLRLSCAASGRPFSSLDMGWFRQRPGKERDVVATINWTGDSTYYLDSVKDRFTISRDNAKNTVFLQMNSLKPEDTAVYYCAARGGGSSVDSEYDVGEFEYDYWGQGTQVTVS

SEQ ID NO: 546 - protein, 130 aa, Homo sapiens
MAQVQLVESGGGLVQAGGSLRLSCAASGRPFSSLDMGWFRQRPGKERDVVATINWTGDSTYYLDSVKCRFTISRDNAKNTVFLQMNSLKPEDTAVYYCAARGGGSSVDSEYDVGEFEYDYWGQGTQVTVS

SEQ ID NO: 547 - protein, 130 aa, Homo sapiens
MAQVQLVESGGGLVQAGGSLRLSCAASGRPFSSLDMGWFRQRPGKERDVVATINWTGDSTYYLDSVEGRFTISRDNAKNTVFLQMNSLKPEDTAVYYCAARGGGSSVDSEYDVGEFEYDYWGQGTQVTVS

SEQ ID NO: 548 - protein, 130 aa, Homo sapiens
MAQVQLVESGGGLVQAGGSLRLSCAASGRPFSSLDMGWFRQRPGKERDVVATINWTGDSTYYLDSMKGRFTISRDNAKNTVFLQMNSLKPEDTAVYYCAARGGGSSVDSEYDVGEFEYDYWGQGTQVTVS

SEQ ID NO: 549 - protein, 130 aa, Homo sapiens
MAQVQLVESGGGLVQAGGSLRLSCAASGRPFSSLDMGWFRQRPGKERDVVATINWTGDSTYYLDSAKGRFTISRDNAKNTVFLQMNSLKPEDTAVYYCAARGGGSSVDSEYDVGEFEYDYWGQGTQVTVS

SEQ ID NO: 550 - protein, 130 aa, Homo sapiens
MAQVQLVESGGGLVQAGGSLRLSCAASGRPFSSLDMGWFRQRPGKERDVVATINWTGDSTYYLDPVKGRFTISRDNAKNTVFLQMNSLKPEDTAVYYCAARGGGSSVDSEYDVGEFEYDYWGQGTQVTVS

SEQ ID NO: 551 - protein, 130 aa, Homo sapiens
MAQVQLVESGGGLVQAGGSLRLSCAASGRPFSSLDMGWFRQRPGKERDVVATINWTGDSAYYLDSVKGRFTISRDNAKNTVFLQMNSLKPEDTAVYYCAARGGGSSVDSEYDVGEFEYDYWGQGTQVTVS

SEQ ID NO: 552 - protein, 130 aa, Homo sapiens
MAQVQLVESGGGLVQAGGSLRLSCAASGRPFSSLDMGWFRQRPGKERDVVATINWTGDNTYYLDSVKGRFTISRDNAKNTVFLQMNSLKPEDTAVYYCAARGGGSSVDSEYDVGEFEYDYWGQGTQVTVS

SEQ ID NO: 553 - protein, 130 aa, Homo sapiens
MAQVQLVESGGGLVQAGGSLRLSCAASGRPFSSLDMGWFRQRPGKERDVVATINWTGDNTYYLDSVKGRFTISRDNAKNTVFLQMNSLKPEDTAIYYCAARGGGSSVDSEYDVGEFEYDYWGQGTQVTVS

SEQ ID NO: 554 - protein, 130 aa, Homo sapiens
MAQVQLVESGGGLVQAGGSLRLSCAASGRPFSSLDMGWFRQRPGKERDVVATINWTDDSTYYLDSVKGRFTISRDNAKNTVFLQMNSLKPEDTAVYYCAARGGGSSVDSEYDVGEFEYDYWGQGTQVTVS

SEQ ID NO: 555 - protein, 130 aa, Homo sapiens
MAQVQLVESGGGLVQAGGSLRLSCAASGRPFSSLDMGWFRQRPGKERDVVATINWIGDSTYYLDSVKGRFTISRDNAKNTVFLQMNSLKPEDTAVYYCAARGGGSSVDSEYDVGEFEYDYWGQGTQVTVS

SEQ ID NO: 556 - protein, 130 aa, Homo sapiens
MAQVQLVESGGGLVQAGGSLRLSCAASGRPFSSLDMGWFRQRPGKERDVVATINWAGDSTYYLDSVKGRFTISRDNAKNTVFLQMNSLKPEDTAVYYCAARGGGSSVDSEYDVGEFEYDYWGQGTQVTVS

SEQ ID NO: 557 - protein, 130 aa, Homo sapiens
MAQVQLVESGGGLVQAGGSLRLSCAASGRPFSSLDMGWFRQAPGKERETVATISWTGGSTYYADSVKGRFTISRDNAKKTVYLQMNSLKPEDTAVYYCAARGGGTSVDSDYDVGEFEYDYWGQGTQVTVS

SEQ ID NO: 558 - protein, 130 aa, Homo sapiens
MAQVQLVESGGGLVQAGGSLRLSCAASGRPFSSLDMGWFRQAPGKEREFVATISWTSGSTYYADSVKGRFTISRDNAKNTVYLQMNSLKPEDTAVYYCAARGGGTSVDSDYDVEEFEYDYWGQGTQVTVS

SEQ ID NO: 559 - protein, 130 aa, Homo sapiens
MAQVQLVESGGGLVQAGGSLRLSCAASGRPFSSLDMGWFRQAPGKEREFVATISWTGGSTYYVDSVKGRFTISRDNAKNTVYLQMNSLKPEDTAVYYCAARGGGTSVDSDYDVEEFEYDYWGQGTQVTVS

SEQ ID NO: 560 - protein, 130 aa, Homo sapiens
MAQVQLVESGGGLVQAGGSLRLSCAASGRPFSSLDMGWFRQAPGKEREFVATISWTGGSTYYADSVKGRFTISRDNAKNTVYLQMNSPKPEDTAVYYCAARGGGTSVDSDYDVEEFEYDYWGQGTQVTVS

SEQ ID NO: 561 - protein, 130 aa, Homo sapiens
MAQVQLVESGGGLVQAGGSLRLSCAASGRPFSSLDMGWFRQAPGKEREFVATISWTGGSTYYADSVKGRFTISRDNAKNTVYLQMNSMKPEDTAVYYCAARGGGTSVDSDYDVEEFEYDYWGQGTQVTVS

SEQ ID NO: 562 - protein, 130 aa, Homo sapiens
MAQVQLVESGGGLVQAGGSLRLSCAASGRPFSSLDMGWFRQAPGKEREFVATISWTGGSTYYADSVKGRFTISRDNAKNTVYLQMNSLKPKDTAVYYCAARGGGTSVDSDYDVEEFEYDYWGQGTQVTVS

SEQ ID NO: 563 - protein, 130 aa, Homo sapiens
MAQVQLVESGGGLVQAGGSLRLSCAASGRPFSSLDMGWFRQAPGKEREFVATISWTGGSTYYADSVKGRFTISRDNAKNTVYLQMNSLKPEDTVVYYCAARGGGTSVDSDYDVEEFEYDYWGQGTQVTVS

SEQ ID NO: 564 - protein, 130 aa, Homo sapiens
MAQVQLVESGGGLVQAGGSLRLSCAASGRPFSSLDMGWFRQAPGKEREFVATISWTGGSTYYADSVKGRFTISRDNAKNTVYLQMNSLKPEDTTVYYCAARGGGTSVDSDYDVEEFEYDYWGQGTQVTVS

SEQ ID NO: 565 - protein, 130 aa, Homo sapiens
MAQVQLVESGGGLVQAGGSLRLSCAASGRPFSSLDMGWFRQAPGKEREFVATISWTGGSTYYADSVKGRFTISRDNAKNTVYLQMNSLKPEDTAVYYCAARGGGTSVDSDYDVGEFEYDYWGQGTQVTVS

SEQ ID NO: 566 - protein, 130 aa, Homo sapiens
MAQVQLVESGGGLVQAGGSLRLSCAASGRPFSSLDMGWFRQAPGKEREFVATISWTGGSTYYADSVKGRFTISRDNAKNTVYLQMNSLKPEDTAVYYCAARGGGTSVDSDYDVEEFGYDYWGQGTQVTVS

SEQ ID NO: 567 - protein, 130 aa, Homo sapiens
MAQVQLVESGGGLVQAGGSLRLSCAASGRPFSSLDMGWFRQAPGKEREFVATISWTGGSTYYADSVKGRFTISRDNAKNTVYLQMNSLKPEDTAVYYCAARGGGTSVDSDYDVEEFEYDYWGQGTQVTVS

SEQ ID NO: 568 - protein, 130 aa, Homo sapiens
MAQVQLVESGGGLVQAGGSLRLSCAASGRPFSSLDMGWFRQAPGKEREFVATISWTGGSTYYADSVKGRFTISRDNAKNTVYLQMNSLKPEDTAVYYCAARGGGTSVDSDYDVEEFEYDYRGQGTQVTVS

SEQ ID NO: 569 - protein, 130 aa, Homo sapiens
MAQVQLVESGGGLVQAGGSLRLSCAASGRPFSSLDMGWFRQAPGKEREFVATISWTGGSTYYADSVKGRFTISRDNAKNTVYLQMNSLKPEDTAVYYCAARGGGTSVDSDYDVEEFEYDDWGQGTQVTVS

SEQ ID NO: 570 - protein, 130 aa, Homo sapiens
MAQVQLVESGGGLVQAGGSLRLSCAASGRPFSSLDMGWFRQAPGKEREFVATISWTGGSTYYADSVKGRFTISRDNAKNTVYLQMNSLKPEDTAIYYCAARGGGTSVDSDYDVEEFEYDYWGQGTQVTVS

SEQ ID NO: 571 - protein, 130 aa, Homo sapiens
MAQVQLVESGGGLVQAGGSLRLSCAASGRPFSSLDMGWFRQAPGKEREFVATISWTGGSTYYADSVKGRFTISRDNAKNAVYLQMNSLKPEDTAVYYCAARGGGTSVDSDYDVEEFEYDYWGQGTQVTVS

SEQ ID NO: 572 - protein, 130 aa, Homo sapiens
MAQVQLVESGGGLVQAGGSLRLSCAASGRPFSSLDMGWFRQAPGKEREFVATISWTGGSTYYADSVKGRFTIPRDNAKNTVYLQMNSLKPEDTAVYYCAARGGGTSVDSDYDVEEFEYDYWGQGTQVTVS

SEQ ID NO: 573 - protein, 130 aa, Homo sapiens
MAQVQLVESGGGLVQAGGSLRLSCAASGRPFSSLDMGWFRQAPGKEREFVATISWTGGSTYYADSVKDRFTISRDNAKNTVYLQMNSLKPEDTAVYYCAARGGGTSVDSDYDVEEFEYDYWGQGTQVTVS

SEQ ID NO: 574 - protein, 130 aa, Homo sapiens
MAQVQLVESGGGLVQAGGSLRLSCAASGRPFSSLDMGWFRQAPGKEREFVATISWTGGSTYYADSMKGRFTISRDNAKNTVYLQMNSLKPEDTAVYYCAARGGGTSVDSDYDVEEFEYDYWGQGTQVTVS

SEQ ID NO: 575 - protein, 130 aa, Homo sapiens
MAQVQLVESGGGLVQAGGSLRLSCAASGRPFSSLDMGWFRQAPGKEREFVATISWTGGSTYYADSAKGRFTISRDNAKNTVYLQMNSLKPEDTAVYYCAARGGGTSVDSDYDVEEFEYDYWGQGTQVTVS

SEQ ID NO: 576 - protein, 130 aa, Homo sapiens
MAQVQLVESGGGLVQAGGSLRLSCAASGRPFSSLDMGWFRQAPGKEREFVAAITWTGGSTYYTDSVKGRFTISRDNTKNTVYLQMNSLKPEDTAVYYCAARGGGTSVDNDYDVGEFEYDYWGQGTQVTVS

SEQ ID NO: 577 - protein, 130 aa, Homo sapiens
MAQVQLVESGGGLVQAGGSLRLSCAASGRPFSSLDMGWFRQAPGKEREFVAAITWTGGSTYYTDSVKGRFTISRDNAKNTVYLQMNSPKPEDTAVYYCAARGGGTSVDNDYDVGEFEYDYWGQGTQVTVS

SEQ ID NO: 578 - protein, 130 aa, Homo sapiens
MAQVQLVESGGGLVQAGGSLRLSCAASGRPFSSLDMGWFRQAPGKEREFVAAITWTGGSTYYTDSVKGRFTISRDNAKNTVYLQMNSMKPEDTAVYYCAARGGGTSVDNDYDVGEFEYDYWGQGTQVTVS

SEQ ID NO: 579 - protein, 130 aa, Homo sapiens
MAQVQLVESGGGLVQAGGSLRLSCAASGRPFSSLDMGWFRQAPGKEREFVAAITWTGGSTYYTDSVKGRFTISRDNAKNTVYLQMNSLKSEDTAVYYCAARGGGTSVDNDYDVGEFEYDYWGQGTQVTVS

SEQ ID NO: 580 - protein, 130 aa, Homo sapiens
MAQVQLVESGGGLVQAGGSLRLSCAASGRPFSSLDMGWFRQAPGKEREFVAAITWTGGSTYYTDSVKGRFTISRDNAKNTVYLQMNSLKPEDTVVYYCAARGGGTSVDNDYDVGEFEYDYWGQGTQVTVS

SEQ ID NO: 581 - protein, 130 aa, Homo sapiens
MAQVQLVESGGGLVQAGGSLRLSCAASGRPFSSLDMGWFRQAPGKEREFVAAITWTGGSTYYTDSVKGRFTISRDNAKNTVYLQMNSLKPEDTAVYYCAARGGGTSVDSDYDVGEFEYDYWGQGTQVTVS

SEQ ID NO: 582 - protein, 130 aa, Homo sapiens
MAQVQLVESGGGLVQAGGSLRLSCAASGRPFSSLDMGWFRQAPGKEREFVAAITWTGGSTYYTDSVKGRFTISRDNAKNTVYLQMNSLKPEDTAVYYCAARGGGTSVDNDYDVGEFEYDYWGQGTQVTVS

SEQ ID NO: 583 - protein, 130 aa, Homo sapiens
MAQVQLVESGGGLVQAGGSLRLSCAASGRPFSSLDMGWFRQAPGKEREFVAAITWTGGSTYYTDSVKGRFTISRDNAKNTVYLQMNSLKPEDTAVYYCAARGGGTSVDNDYDVGEFEYDYWGHGTQVTVS

SEQ ID NO: 584 - protein, 130 aa, Homo sapiens
MAQVQLVESGGGLVQAGGSLRLSCAASGRPFSSLDMGWFRQAPGKEREFVAAITWTGGSTYYTDSVKGRFTISRDNAKNTVYLQMNSLKPEDTAVYYCAARGGGTSVDNDYDVGEFEYDYWDQGTQVTVS

SEQ ID NO: 585 - protein, 130 aa, Homo sapiens
MAQVQLVESGGGLVQAGGSLRLSCAASGRPFSSLDMGWFRQAPGKEREFVAAITWTGGSTYYTDSVKGRFTISRDNAKNTVYLQMNSLKPEDTAVYYCAARGGGTSVDNDYDVGEFEYDYGGQGTQVTVS

SEQ ID NO: 586 - protein, 130 aa, Homo sapiens
MAQVQLVESGGGLVQAGGSLRLSCAASGRPFSSLDMGWFRQAPGKEREFVAAITWTGGSTYYTDSVKGRFTISRDNAKNTVYLQMNSLKHEDTAVYYCAARGGGTSVDNDYDVGEFEYDYWGQGTQVTVS

SEQ ID NO: 587 - protein, 130 aa, Homo sapiens
MAQVQLVESGGGLVQAGGSLRLSCAASGRPFSSLDMGWFRQAPGKEREFVAAITWTGGSTYYTDSVKGRFTISRDNAKNLVYLQMNSLKPEDTAVYYCAARGGGTSVDNDYDVGEFEFDYWGQGTQVTVS

SEQ ID NO: 588 - protein, 130 aa, Homo sapiens
MAQVQLVESGGGLVQAGGSLRLSCAASGRPFSSLDMGWFRQAPGKEREFVAAITWTGGSTYYTDSMKGRFTISRDNAKNTVYLQMNSLKPEDTAVYYCAARGGGTSVDNDYDVGEFEYDYWGQGTQVTVS

SEQ ID NO: 589 - protein, 130 aa, Homo sapiens
MAQVQLVESGGGLVQAGGSLRLSCAASGRPFSSLDMGWFRQAPGKERDIVATISWTGGTTYYTDSVKGRFTISRDNAKNTVYLQMNSLKPEDTAVYYCAARGGGTSVDSDYDVGEFEYDYWGQGTQVTVS

SEQ ID NO: 590 - protein, 130 aa, Homo sapiens
MAQVQLVESGGGLVQAGGSLRLSCAASGRPFSSLDMGWFRQAPGKERDIVATISWTGGTTFYADSVKGRFTISRDNAKNTVYLQMSSLKPEDTAVYYCAARGGGTSVDSDYDVGEFEYDYWGQGTQVTVS

SEQ ID NO: 591 - protein, 130 aa, Homo sapiens
MAQVQLVESGGGLVQAGGSLRLSCAASGRPFSSLDMGWFRQAPGKERDIVATISWTGGSTYYADSVKGRFTISRDNAKNTVYLQMNSLKPEDTAVYYCAARGGGTSVDSDYDVGEFEYDYWGQGTQVTVS

SEQ ID NO: 592 - protein, 130 aa, Homo sapiens
MAQVQLVESGGGLVQAGGSLRLSCAASGRPFSSLDMGWFRQAPGKERDIVATISWTGGSTYYADSVKGRFTISRDNAKNTVYLQMNSLKPEDTAVYYCAARGGGTSVDSDYDVGEFDYDYWGQGTQVTVS

SEQ ID NO: 593 - protein, 130 aa, Homo sapiens
MAQVQLVESGGGLVQAGGSLRLSCAASGRPFSSLDMGWFRQAPGKERDIVATISWTGGSTYYADSVKGRFTISRDNAKNTVYLQMNSLKPEDTAVYYCAARGGGTSVDSDYDVEEFDYDYWGQGTQVTVS

SEQ ID NO: 594 - protein, 130 aa, Homo sapiens
MAQVQLVESGGGLVQAGGSLRLSCAASGRPFSSLDMGWFRQAPGKERDIVATISWTGGSTYYADSVKGRFTISRDNAKNTVYLQMNNLKPEDTAVYYCAARGGGTSVDSDYDVGEFEYDYWGQGTQVTVS

SEQ ID NO: 595 - protein, 130 aa, Homo sapiens
MAQVQLVESGGGLVQAGGSLRLSCAASGRPFSSLDMGWFRQAPGKERDIVATISWTGGSTYYADSVKGRFTIFRDNAKNTVYLQMNSLKPEDTAVYYCAARGGGTSVDSDYDVGEFEYDYWGQGTQVTVS

SEQ ID NO: 596 - protein, 130 aa, Homo sapiens
MAQVQLVESGGGLVQAGGSLRLSCAASGRPFSSLDMGWFRQAPGKERDIVATISWTGGMTYYADSVKGRFTISRDNAKNTVYLQMNSLKPEDTAVYYCAARGGGTSVDSDYDVGEFEYDYWGQGTQVTVS

SEQ ID NO: 597 - protein, 130 aa, Homo sapiens
MAQVQLVESGGGLVQAGGSLRLSCAASGRPFSSLDMGWFRQAPGKERDIVATISWTGDSTYYADSVKGRFTISRDNAKNTVYLQMNSLKPEDTAVYYCAARGGGTSVDSDYDVGEFEYDYWGQGTQVTVS

SEQ ID NO: 598 - protein, 130 aa, Homo sapiens
MAQVQLVESGGGLVQAGGSLRLSCAASGRPFSSLDMGWFRQAPGKERDIVATINWTGGSTYYADSVKGRFTISRDNAKNTVYLQMNSLKPEDTAVYYCAARGGGTSVDSDYDVGEFEYDYWGQGTQVTVS

SEQ ID NO: 599 - protein, 130 aa, Homo sapiens
MAQVQLVESGGGLVQAGGSLRLSCAASGRPFSSLDMDWFRQRPGKERDVVATINWTGDSTYYLDSVKGRFTISRDNAKNTVFLQMNSLKPEDTAVYYCAARGGGSSVDSEYDVGEFEYDYWGQGTQVTVS

SEQ ID NO: 600 - protein, 130 aa, Homo sapiens
MAQVQLVESGGGLVQAGGSLRLSCAASGRPFSSLDMDWFRQAPGKEREFVATISWTGGSTYYADSVKGRFTISRDNAKNTVYLQMNSLKPEDTAVYYCAARGGGTSVDSDYDVEEFEYDYWGQGTQVTVS

SEQ ID NO: 601 - protein, 130 aa, Homo sapiens
MAQVQLVESGGGLVQAGGSLRLSCAASGRPFSSLDMDWFRQAPGKEREFVAAITWTGGSTYYTDSVKGRFTISRDNAKNTVYLQMNSLKPEDTAVYYCAARGGGTSVDNDYDVGEFEYDYWGQGTQVTVS

SEQ ID NO: 602 - protein, 130 aa, Homo sapiens
MAQVQLVESGGGLVQAGGSLRLSCAASGRPFSSLDMCWFRQRPGKERDVVATINWTGDSTYYLDSVKGRFTISRDNAKNTVFLQMNSLKPEDTAVYYCAARGGGSSVDSEYDVGEFEYDYWGQGTQVTVS

SEQ ID NO: 603 - protein, 130 aa, Homo sapiens
MAQVQLVESGGGLVQAGGSLRLSCAASGRPFSSLDIGWFRQRPGKERDVVATINWTGDSTYYLDSVKGRFTISRDNAKNTVFLQMNSLKPEDTAVYYCAARGGGSSVDSEYDVGEFEYDYWGQGTQVTVS

SEQ ID NO: 604 - protein, 130 aa, Homo sapiens
MAQVQLVESGGGLVQAGGSLRLSCAASGRPFSSLDIGWFRQAPGKEREFVATISWTGGSTYYADSVKGRFTISRDNAKNTVYLQMNSLKPEDTAVYYCAARGGGTSVDSDYDVEEFEYDYWGQGTQVTVS

SEQ ID NO: 605 - protein, 130 aa, Homo sapiens
MAQVQLVESGGGLVQAGGSLRLSCAASGRPFSSFDMGWFRQRPGKERDVVATINWTGDSTYYLDSVKGRFTISRDNAKNTVFLQMNSLKPEDTAVYYCAARGGGSSVDSEYDVGEFEYDYWGQGTQVTVS

SEQ ID NO: 606 - protein, 130 aa, Homo sapiens
MAQVQLVESGGGLVQAGGSLRLSCAASGRPFSNLDMGWFRQRPGKERDVVATINWTGDSTYYLDSVKGRFTISRDNAKNTVFLQMNSLKPEDTAVYYCAARGGGSSVDSEYDVGEFEYDYWGQGTQVTVS

SEQ ID NO: 607 - protein, 130 aa, Homo sapiens
MAQVQLVESGGGLVQAGGSLRLSCAASGRPFRSLDMGWFRQRPGKERDVVATINWTGDSTYYLDSVKGRFTISRDNAKNTVFLQMNSLKPEDTAVYYCAARGGGSSVDSEYDVGEFEYDYWGQGTQVTVS

SEQ ID NO: 608 - protein, 130 aa, Homo sapiens
MAQVQLVESGGGLVQAGGSLRLSCAASGRPFNSLDMGWFRQRPGKERDVVATINWTGDSTYYLDSVKGRFTISRDNAKNTVFLQMNSLKPEDTAVYYCAARGGGSSVDSEYDVGEFEYDYWGQGTQVTVS

SEQ ID NO: 609 - protein, 130 aa, Homo sapiens
MAQVQLVESGGGLVQAGGSLRLSCAASGRPFNMYDMGWFSQALGKEREFVATVSWTGSSTNYADSVKGRFTISRDNAKNTVYLEMNSLKPEDTAVYYCAARGGGTSVDSDYDVGEFEYDYWGQGTQVTVS

SEQ ID NO: 610 - protein, 130 aa, Homo sapiens
MAQVQLVESGGGLVQAGGSLRLSCAASGRPFNMYDMGWFRQTLGKEREFVATVSWTGSSTNYADSVKGRFTISRDNAKNTVYLEMNSLKPEDTAVYYCAARGGGTSVDSDYDVGEFEYDYWGQGTQVTVS

SEQ ID NO: 611 - protein, 130 aa, Homo sapiens
MAQVQLVESGGGLVQAGGSLRLSCAASGRPFNMYDMGWFRQARGKEREFVATVSWTGSSTNYADSVKGRFTISRDNAKNTVYLEMNSLKPEDTAVYYCAARGGGTSVDSDYDVGEFEYDYWGQGTQVTVS

SEQ ID NO: 612 - protein, 130 aa, Homo sapiens
MAQVQLVESGGGLVQAGGSLRLSCAASGRPFNMYDMGWFRQAPGKEREFVATVSWTGSSTNYADSVKGRFTISRDNAKNTVYLEMNSLKPEDTAVYYCAARGGGTSVDSDYDVGEFEYDYWGQGTQVTVS

SEQ ID NO: 613 - protein, 130 aa, Homo sapiens
MAQVQLVESGGGLVQAGGSLRLSCAASGRPFNMYDMGWFRQALGKEREFVSTVSWTGSSTNYADSVKGRFTISRDNAKNTVYLEMNSLKPEDTAVYYCAARGGGTSVDSDYDVGEFEYDYWGQGTQVTVS

SEQ ID NO: 614 - protein, 130 aa, Homo sapiens
MAQVQLVESGGGLVQAGGSLRLSCAASGRPFNMYDMGWFRQALGKEREFVATVSWTGSSTNYVDSVKGRFTISRDNAKNTVYLEMNSLKPEDTAVYYCAARGGGTSVDSDYDVGEFEYDYWGQGTQVTVS

SEQ ID NO: 615 - protein, 130 aa, Homo sapiens
MAQVQLVESGGGLVQAGGSLRLSCAASGRPFNMYDMGWFRQALGKEREFVATVSWTGSSTNYADSVKGRFTISRDNTKNTVYLEMNSLKPEDTAVYYCAARGGGTSVDSDYDVGEFEYDYWGQGTQVTVS

SEQ ID NO: 616 - protein, 130 aa, Homo sapiens
MAQVQLVESGGGLVQAGGSLRLSCAASGRPFNMYDMGWFRQALGKEREFVATVSWTGSSTNYADSVKGRFTISRDNAKNTVYLEMNSLKPEDTTVYYCAARGGGTSVDSDYDVGEFEYDYWGQGTQVTVS

SEQ ID NO: 617 - protein, 130 aa, Homo sapiens
MAQVQLVESGGGLVQAGGSLRLSCAASGRPFNMYDMGWFRQALGKEREFVATVSWTGSSTNYADSVKGRFTISRDNAKNTVYLEMNSLKPEDTAVYYCAARGGGTSVDSDYDVGEFKYDYWGQGTQVTVS

SEQ ID NO: 618 - protein, 130 aa, Homo sapiens
MAQVQLVESGGGLVQAGGSLRLSCAASGRPFNMYDMGWFRQALGKEREFVATVSWTGSSTNYADSVKGRFTISRDNAKNTVYLEMNSLKPEDTAVYYCAARGGGTSVDSDYDVGEFEYDYWGQGTQVTVS

SEQ ID NO: 619 - protein, 129 aa, Homo sapiens
MAQVQLVESGGGLVQAGGSLRLSCAASGRPFNMYDMGWFRQALGKEREFVATVSWTGSSTNYADSVKGRFTISRDNAKNTVYLEMNSLKPEDTAVYYCAARGGGTSVDSDYDVGEFEYDYWGQGPRSPS

SEQ ID NO: 620 - protein, 130 aa, Homo sapiens
MAQVQLVESGGGLVQAGGSLRLSCAASGRPFNMYDMGWFRQALGKEREFVATVSWTGSSTNYADSVKGRFTISRDNAKNTVYLEMNSLKPEDMAVYYCAARGGGTSVDSDYDVGEFEYDYWGQGTQVTVS

SEQ ID NO: 621 - protein, 130 aa, Homo sapiens
MAQVQLVESGGGLVQAGGSLRLSCAASGRPFNMYDMGWFRQALGKEREFVATVSWTGSSTNYADSVKGRFTISRDNAKNTVYLEMNNLKPEDTAVYYCAARGGGTSVDSDYDVGEFEYDYWGQGTQVTVS

SEQ ID NO: 622 - protein, 130 aa, Homo sapiens
MAQVQLVESGGGLVQAGGSLRLSCAASGRPFNMYDMGWFRQALGKEREFVATVSWTGSSTNYADSMKGRFTISRDNAKNTVYLEMNSLKPEDTAVYYCAARGGGTSVDSDYDVGEFEYDYWGQGTQVTVS

SEQ ID NO: 623 - protein, 130 aa, Homo sapiens
MAQVQLVESGGGLVQAGGSLRLSCAASGRPFNMYDMGWFRQALGKEREFVATVSWTGSSTNYADSAKGRFTISRDNAKNTVYLEMNSLKPEDTAVYYCAARGGGTSVDSDYDVGEFEYDYWGQGTQVTVS

SEQ ID NO: 624 - protein, 130 aa, Homo sapiens
MAQVQLVESGGGLVQAGGSLRLSCAASGRPFNMYDMGWFRQALGKEREFVATVSWTGSNTNYADSVKGRFTISRDNAKNTVYLEMNSLKPEDTAVYYCAARGGGTSVDSDYDVGEFEYDYWGQGTQVTVS

SEQ ID NO: 625 - protein, 130 aa, Homo sapiens
MAQVQLVESGGGLVQAGGSLRLSCAASGRPFNMYDMGWFRQALGKEHEFVATVSWTGSSTNYADSVKGRFTISRDNAKNTVYLEMNSLKPEDTAVYYCAARGGGTSVDSDYDVGEFEYDYWGQGTQVTVS

SEQ ID NO: 626 - protein, 130 aa, Homo sapiens
MAQVQLVESGGGLVQAGGSLRLSCAASGRPFNMYDMGWFHQALGKEREFVATVSWTGSSTNYADSVKGRFTISRDNAKNTVYLEMNSLKPEDTAVYYCAARGGGTSVDSDYDVGEFEYDYWGQGTQVTVS

SEQ ID NO: 627 - protein, 130 aa, Homo sapiens
MAQVQLVESGGGLVQAGGSLRLSCAASGRPFNMYDMGLFRQALGKEREFVATVSWTGSSTNYADSVKGRFTISRDNAKNTVYLEMNSLKPEDTAVYYCAARGGGTSVDSDYDVGEFEYDYWGQGTQVTVS

SEQ ID NO: 628 - protein, 129 aa, Homo sapiens
MAQVQLVESGGGLVQAGGSLRLSCAASGRAFSSYTMGWFHQAPGKEREFVAEISGTGGNTGYADSVKGRFTISRDNAKNTVYLQMNSLKPEDTAVYYCAAVIGSPTDSTDYRSSLDYDYWGQGTQVTVS

SEQ ID NO: 629 - protein, 129 aa, Homo sapiens
MAQVQLVESGGGLVQAGGSLRLSCAASGRAFNTYTMGWFRQAPGLERDFVAEISWSGGSTGYADSVKGRFTISRDNAKNTVYLQMNSLKPQDTAVYYCAAVIGSPTDYSDYRSSLDYDYWGQGTQVTVS

SEQ ID NO: 630 - protein, 127 aa, Homo sapiens
MAQVQLVESGGGLVQAGGSLRLSCAASGRAFDRYTMAWFRQGPGKEREFVATVGWNDNSIYYADSVKGRFTISRDNAKNTVYLQMNSLKPEDTAVYYCAATFGSPVDTPLDRGAYDFWGQGTQVTVS

SEQ ID NO: 631 - protein, 129 aa, Homo sapiens
MAQVQLVESGGGLVQAGGSLRLSCAASGPTFSSYTMGWFRQAPGLERDFVAEIGWSGGSTGYADSVKGRFTISRDNAKNTVYLQMNSLKPQDTAVYYCAAVIGSPTDYSDYRSSLDYDYWGQGTQVTVS

SEQ ID NO: 632 - protein, 129 aa, Homo sapiens
MAQVQLVESGGGLVQAGGSLRLSCAASGPSLSWYGMAWFRQPPGKERELVADVSWSGGSTYYRDSVKGRFTISRDNAKNTVYLQMNGLKPEDTAVYYCAARTSSSVDPWNYVGVGDYDYWGQGTQVTVS

SEQ ID NO: 633 - protein, 130 aa, Homo sapiens
MAQVQLVESGGGLVQAGGSLRLSCAASGLPFSSLDMGWFRQRPGKERDVVATINWTGDSTYYLDSVKGRFTISRDNAKNTVFLQMNSLKPEDTAVYYCAARGGGSSVDSEYDVGEFEYDYWGQGTQVTVS

SEQ ID NO: 634 - protein, 129 aa, Homo sapiens
MAQVQLVESGGGLVQAGGSLRLSCAASGHTFSSYTMGWFHQAPGKEREFVAEISGTGGNTGYADSVKGRFTISRDNAKNTVYLQMNSLKPEDTAVYYCAAVIGSPTDSSNYRSSLDYDYWGQGTQVTVS

SEQ ID NO: 635 - protein, 130 aa, Homo sapiens
MAQVQLVESGGGLVQAGGSLRLSCAASGFTLDYYGIGWFRQAPGKEREGVSCIDSSGGSTFYADSVKGRFTISRDNAKNTLYLQMNSLKPEDTAVYYCAAVLGDSVDYGMGYCNLDEYDYWGQGTQVTVS

SEQ ID NO: 636 - protein, 123 aa, Homo sapiens
MAQVQLVESGGGLVQAGGSLRLSCAASGFTFSTYAMGWVRQAPGKGPEWVATIYSKGDTTHYANSAKGRFTISRDNARNTLYLQMNSLKPEDTAVYYCAKGISDSYLRVESNYRGQGTQVTVS

SEQ ID NO: 637 - protein, 127 aa, Homo sapiens
MAQVQLVESGGGLVQAGGSLRLSCAAAGRTSSDYAMGWFRQAPGKEREFVAAVNWSGVSTYYADSVKGRFTISRDNAKNTVHLQMNSLKPEDTAVYYCAAEKLESLRNWHDPLMYDYWGQGTQVTVS

SEQ ID NO: 638 - protein, 127 aa, Homo sapiens
MAQVQLVESGGGLVQAGGSLRLSCAAAGRTSSDYAMGWFRQAPGKEREFVAAINWSGISTYYADSVKGRFTISRDNAKNTVHLQMNSLKPEDTAVYYCAAEKLESLREWHDPLMYDYWGQGTQVTVS

SEQ ID NO: 639 - protein, 127 aa, Homo sapiens
MAQVQLVESGGGLVQAGGSLRLSCAAAGRTSSDYAMGWFRQAPGEERVFVAAINWSGISTYYADSVKGRFTISRDNAKNTVHLQMNSLKPEDTAVYYCAAEKLESLRNWHDPLMYDYWGQGTQVTVS

SEQ ID NO: 640 - protein, 127 aa, Homo sapiens
MAQVQLVESGGGLVQAGGSLMLSCAAARRTSNDYAMGWFRQAPGKEREFVAAINWSGISTYYADSVKGRFTISRDSAKNTVHLQMNSLKPEDTAVYYCAAEKLESLRNWHDPLMYDYWGQGTQVTVS

SEQ ID NO: 641 - protein, 127 aa, Homo sapiens
MAQVQLVESGGGLVQAGGSLMLSCAAAGRTSNDYAMGWFRQAPGKEREFVAAINWSGISTYYADSVKGRFTISRDNAKNTVHLQMNSLKPEDTAVYYCAAEKLESLRMWHDPLMYDYWGQGTQVTVS

SEQ ID NO: 642 - protein, 130 aa, Homo sapiens
MAQVQLVESGGGLVQAGGSLGLSCAASGRPFSSLDMGWFRQRPGKERDVVATINWTGDSTYYLDSVKGRFTISRDNAKNTVFLQMNSLKPEDTAVYYCAARGGGSSVDSEYDVGEFEYDYWGQGTQVTVS

SEQ ID NO: 643 - protein, 133 aa, Homo sapiens
MAQVQLVESGGGLVQAGDSLRLSCVASVASGRTFGWYDMGWFRQAPGKEREFVAAISWSGGSTYYADSVKGRSTISRDNAKNTVYLQMNSLKPEDTAVYYCAARGGGTSVDSDYDVGEFEYDYWGQGTQVTVS

SEQ ID NO: 644 - protein, 129 aa, Homo sapiens
MAQVQLVESGGGLVQAGDSLRLSCVASGRTFSTYTMGWFRQAPGKEREFVAHIGWSGSSTYYGDSVKGRFTISRDNAKNTMYLQMNNLKPEDTAVYYCAVAIGSPVDSYRHSDPLEYDYWGQGTQVTVS

SEQ ID NO: 645 - protein, 127 aa, Homo sapiens
MAQVQLVESGGGLVQAGDSLRLSCTASGRTFSTYTMAWFRQAPGKEREFVAAISWSGTYYADSVKGRFTISRDNAKNTVYLQMNSLKPEDTAVYYCAAVSGSTVDTYSPSDPLEYDYWGQGTQVTVS

SEQ ID NO: 646 - protein, 127 aa, Homo sapiens
MAQVQLVESGGGLVQAGDSLRLSCTASGRTFSTYTMAWFRQAPGKEREFVAAISWSGTYYADSVKGRFTISRDNAKNTVYLQMNSLKPEDTAVYYCAAVIGSTVDTYNPSDPLEYDYWGQGTQVTVS

SEQ ID NO: 647 - protein, 127 aa, Homo sapiens
MAQVQLVESGGGLVQAGDSLRLSCTASGRTFSTYTMAWFRQAPGKEREFVAAISWSGTYYADSVKGRFTISRDNAKNTVYLQMNSLKPEDTAVYYCAAVIGSTVDSYSPSDPLEYDYWGQGTQVTVS

SEQ ID NO: 648 - protein, 127 aa, Homo sapiens
MAQVQLVESGGGLVQAGDSLRLSCTASGRTFSTYTMAWFRQAPGKEREFVAAISWSGAYYAESVKGRFTISRDNAKNTVYLQMNSLKPEDTAVYYCAAVIGSTVDSYSPSDPLEYDYWGQGTQVTVS

SEQ ID NO: 649 - protein, 129 aa, Homo sapiens
MAQVQLVESGGGLVQAGDSLRLSCAASGRTFSTYTMGWFRQAPGKEREFVAHINWSGSSTYYADSVKGRFTISRDNAKNTMYLQMNSLKPEDTAVYYCAVTIGSPVDSYRHSDPLEYDYWGQGTQVTVS

SEQ ID NO: 650 - protein, 129 aa, Homo sapiens
MAQVQLVESGGGLVQAGDSLRLSCAASGRTFSTYTMGWFRQAPGKEREFVAHINWSGSSTYYADSVKGRFTISRDNAKNTMYLQMNSLKPDDTAVYYCAVTIGSPVDSYRHSDPLEYDYWGQGTQVTVS

SEQ ID NO: 651 - protein, 129 aa, Homo sapiens
MAQVQLVESGGGLVQAGDSLRLSCAASGRTFSTYTMGWFRQAPGKEREFVAHINWSGSSTYYADSVKGRFTISRDNAKNTMYLQMNSLKPDDTAVYYCAVTIGSPVDSYRHGDPLEYDYWGQGTQVTVS

SEQ ID NO: 652 - protein, 127 aa, Homo sapiens
MAQVQLVESGGGLVQAGDSLRLSCAASGRTFSTYTMAWFRQAPGKEREFVAAISWSGTYYADSVKGRFTISRDNAKNTVYLQMNSLKPEDTAVYYCAAVIGSTVDSYSPSDPLEYDYWGQGTQVTVS

SEQ ID NO: 653 - protein, 126 aa, Homo sapiens
MAQVQLVESGGGLVQAGDSLRLSCAASGRTFRSYTMGWFRQAPGKEREFVAAISWSGGSTYYADSVKGRFTISRDNAKTTVYLQMNSLKPEDTAVYYCAASKYYSGNYYSQVRYDYWGQGTQVTVS

SEQ ID NO: 654 - protein, 130 aa, Homo sapiens
MAQVQLVESGGGLVQAGDSLRLSCAASGRPFSSLDMGWFRQRPGKERDVVATINWTGDSTYYLDSVKGRFTISRDNAKNTVFLQMNSLKPEDTAVYYCAARGGGSSVDSEYDVGEFEYDYWGQGTQVTVS

SEQ ID NO: 655 - protein, 130 aa, Homo sapiens
MAQVQLVESGGGLVQAGDSLRLSCAASGRPFSSLDMGWFRQAPGKEREFVATISWTGGSTYYADSVKGRFTISRDNAKNTVYLQMNSLKPEDTAVYYCAARGGGTSVDSDYDVEEFEYDYWGQGTQVTVS

SEQ ID NO: 656 - protein, 127 aa, Homo sapiens
MAQVQLVESGGGLVQAGDSLRLSCAASGITFRWYTMAWFRQAPGKERDFVATINWSGSDTNYADSVKGRFTISRDNAKNTVTLQMNSLQPEDTAVYYCAGVPGTSLSGETDPRDYDYWGQGTQVTVS

SEQ ID NO: 657 - protein, 129 aa, Homo sapiens
MAQVQLVESGGGLVQAGASLRLSCVASGGTFSSYAMAWFRQAPGKEREFVAEDSWSNHRVWYSDSVKGRFTISRDNAKNTVYLQMNNLKPEDTAVYYCAAYRDYSGSTVDPPNQSEYDYWGQGTQVTVS

SEQ ID NO: 658 - protein, 129 aa, Homo sapiens
MAQVQLVESGGGLVQAGASLRLSCTASGGTFSSYAMAWFRQAPGKEREFVAEDSWSNHRVWYSDSVKGRFTISRDNAKNTVYLQMNNLKPEDTAVYYCAAYRDYSGSTVDPPNQSEYDYWGQGTQVTVS

SEQ ID NO: 659 - protein, 130 aa, Homo sapiens
MAQVQLVESGGGLVQAGASLRLSCAASGRPFSSLDMGWFRQAPGKEREFVATISWTGGSTYYADSVKGRFTISRDNAKNTVYLQMNSLKPEDTAVYYCAARGGGTSVDSDYDVEEFEYDYWGQGTQVTVS

SEQ ID NO: 660 - protein, 129 aa, Homo sapiens
MAQVQLVESGGGLVQAGASLRLSCAASGGTFSSYVMAWFRQAPGKEREFVAEDSWSNHRVWYSDSVKGRFTISRDNAKNTVYLQMNNLKPEDTAVYYCAAYRDYSGSTVDPPNQSEYDYWGQGTQVTVS

SEQ ID NO: 661 - protein, 129 aa, Homo sapiens
MAQVQLVESGGGLVQAGASLRLSCAASGGTFSSYAMAWLRQAPGKEREFVAEDSWSNHRVWYSDSVKGRFTISRDNAKNTVYLQMNNLKPEDTAVYYCAAYRDYSGSTVDPPNQSEYDYWGQGTQVTVS

SEQ ID NO: 662 - protein, 129 aa, Homo sapiens
MAQVQLVESGGGLVQAGASLRLSCAASGGTFSSYAMAWFRRAPGKEREFVAEDSWSNHRVWYSDSVKGRFTISRDNAKNTVYLQMNNLKPEDTAVYYCAAYRDYSGSTVDPPNQSEYDYWGQGTQVTVS

SEQ ID NO: 663 - protein, 129 aa, Homo sapiens
MAQVQLVESGGGLVQAGASLRLSCAASGGTFSSYAMAWFRQAPWKEREFVAEDSWSNHRVWYSDSVKGRFTISRDNAKNTVYLQMNNLKPEDTAVYYCAAYRDYSGSTVDPPNQSEYDYWGQGTQVTVS

SEQ ID NO: 664 - protein, 129 aa, Homo sapiens
MAQVQLVESGGGLVQAGASLRLSCAASGGTFSSYAMAWFRQAPVKEREFVAEDSWSNHRVWYSDSVKGRFTISRDNAKNTVYLQMNNLKPEDTAVYYCAAYRDYSGSTVDPPNQSEYDYWGQGTQVTVS

SEQ ID NO: 665 - protein, 129 aa, Homo sapiens
MAQVQLVESGGGLVQAGASLRLSCAASGGTFSSYAMAWFRQAPGKEREFVVEDSWSNHRVWYSDSVKGRFTISRDNAKNTVYLQMNNLKPEDTAVYYCAAYRDYSGSTVDPPNQSEYDYWGQGTQVTVS

SEQ ID NO: 666 - protein, 129 aa, Homo sapiens
MAQVQLVESGGGLVQAGASLRLSCAASGGTFSSYAMAWFRQAPGKEREFVAEYSWSNHRVWYSDSVKGRFTISRDNAKNTVYLQMNNLKPEDTAVYYCAAYRDYSGSTVDPPNQSEYDYWGQGTQVTVS

SEQ ID NO: 667 - protein, 129 aa, Homo sapiens
MAQVQLVESGGGLVQAGASLRLSCAASGGTFSSYAMAWFRQAPGKEREFVAEDSWSNHSVWYSDSVKGRFTISRDNAKNTVYLQMNNLKPEDTAVYYCAAYRDYSGSTVDPPNQSEYDYWGQGTQVTVS

SEQ ID NO: 668 - protein, 129 aa, Homo sapiens
MAQVQLVESGGGLVQAGASLRLSCAASGGTFSSYAMAWFRQAPGKEREFVAEDSWSNHRVWYSDSVKGRFTISRDNTKNTVYLQMNNLKPEDTAVYYCAAYRDYSGSTVDPPNQSEYDYWGQGTQVTVS

SEQ ID NO: 669 - protein, 129 aa, Homo sapiens
MAQVQLVESGGGLVQAGASLRLSCAASGGTFSSYAMAWFRQAPGKEREFVAEDSWSNHRVWYSDSVKGRFTISRDNAKNTVYLQMNSLKPEDTAVYYCAAYRDYSGSTVDPPNQSEYDYWGQGTQVTVS

SEQ ID NO: 670 - protein, 129 aa, Homo sapiens
MAQVQLVESGGGLVQAGASLRLSCAASGGTFSSYAMAWFRQAPGKEREFVAEDSWSNHRVWYSDSVKGRFTISRDNAKNTVYLQMNNPKPEDTAVYYCAAYRDYSGSTVDPPNQSEYDYWGQGTQVTVS

SEQ ID NO: 671 - protein, 129 aa, Homo sapiens
MAQVQLVESGGGLVQAGASLRLSCAASGGTFSSYAMAWFRQAPGKEREFVAEDSWSNHRVWYSDSVKGRFTISRDNAKNTVYLQMNNLKPEGTAVYYCAAYRDYSGSTVDPPNQSEYDYWGQGTQVTVS

SEQ ID NO: 672 - protein, 129 aa, Homo sapiens
MAQVQLVESGGGLVQAGASLRLSCAASGGTFSSYAMAWFRQAPGKEREFVAEDSWSNHRVWYSDSVKGRFTISRDNAKNTVYLQMNNLKPEDTVVYYCAAYRDYSGSTVDPPNQSEYDYWGQGTQVTVS

SEQ ID NO: 673 - protein, 129 aa, Homo sapiens
MAQVQLVESGGGLVQAGASLRLSCAASGGTFSSYAMAWFRQAPGKEREFVAEDSWSNHRVWYSDSVKGRFTISRDNAKNTVYLQMNNLKPEDTAVYYCVAYRDYSGSTVDPPNQSEYDYWGQGTQVTVS

SEQ ID NO: 674 - protein, 129 aa, Homo sapiens
MAQVQLVESGGGLVQAGASLRLSCAASGGTFSSYAMAWFRQAPGKEREFVAEDSWSNHRVWYSDSVKGRFTISRDNAKNTVYLQMNNLKPEDTAVYYCTAYRDYSGSTVDPPNQSEYDYWGQGTQVTVS

SEQ ID NO: 675 - protein, 129 aa, Homo sapiens
MAQVQLVESGGGLVQAGASLRLSCAASGGTFSSYAMAWFRQAPGKEREFVAEDSWSNHRVWYSDSVKGRFTISRDNAKNTVYLQMNNLKPEDTAVYYCAAYRDYSGSTVDPPNQSEYNYWGQGTQVTVS

SEQ ID NO: 676 - protein, 129 aa, Homo sapiens
MAQVQLVESGGGLVQAGASLRLSCAASGGTFSSYAMAWFRQAPGKEREFVAEDSWSNHRVWYSDSVKGRFTISRDNAKNTVYLQMNNLKPEDTAVYYCAAYRDYSGSTVDPPNQSEYDYWGQRTQVTVS

SEQ ID NO: 677 - protein, 128 aa, Homo sapiens
MAQVQLVESGGGLVQAGASLRLSCAASGGTFSSYAMAWFRQAPGKEREFVAEDSWSNHRVWYSDSVKGRFTISRDNAKNTVYLQMNNLKPEDTAVYYCAAYRDYSGSTVDPPNQSEYDYWGQGPRSPS

SEQ ID NO: 678 - protein, 129 aa, Homo sapiens
MAQVQLVESGGGLVQAGASLRLSCAASGGTFSSYAMAWFRQAPGKEREFVAEDSWSNHRVWYSDSVKGRFTISRDNAKNTVYLQMNNLKPEDTAVYYCAAYRDYSGSTVDPPNQSEYDYWGHGTQVTVS

SEQ ID NO: 679 - protein, 129 aa, Homo sapiens
MAQVQLVESGGGLVQAGASLRLSCAASGGTFSSYAMAWFRQAPGKEREFVAEDSWSNHRVWYSDSVKGRFTISRDNAKNTVYLQMNNLKPEDTAVYYCAAYRDYSGSTVDPPNQSEYDHWGQGTQVTVS

SEQ ID NO: 680 - protein, 129 aa, Homo sapiens
MAQVQLVESGGGLVQAGASLRLSCAASGGTFSSYAMAWFRQAPGKEREFVAEDSWSNHRVWYSDSVKGRFTISRDNAKNTVYLQMNNLKPEDTAVYYCAAYRDYSGSTVDPPNQSEYDDWGQGTQVTVS

SEQ ID NO: 681 - protein, 129 aa, Homo sapiens
MAQVQLVESGGGLVQAGASLRLSCAASGGTFSSYAMAWFRQAPGKEREFVAEDSWSNHRVWYSDSVKGRFTISRDNAKNTVYLQMNNLKPEDTAVYYCAAYRDYSGSTVDPPNQSEYDCWGQGTQVTVS

SEQ ID NO: 682 - protein, 129 aa, Homo sapiens
MAQVQLVESGGGLVQAGASLRLSCAASGGTFSSYAMAWFRQAPGKEREFVAEDSWSNHRVWYSDSVKGRFTISRDNAKNTVYLQMNNLKPEDTAVYYCAAYCDYSGSTVDPPNQSEYDYWGQGTQVTVS

SEQ ID NO: 683 - protein, 129 aa, Homo sapiens
MAQVQLVESGGGLVQAGASLRLSCAASGGTFSSYAMAWFRQAPGKEREFVAEDSWSNHRVWYSDSVKGRFTISRDNAKNTVYLQMNNLKPEDTAVYYCAADRDYSGSTVDPPNQSEYDYWGQGTQVTVS

SEQ ID NO: 684 - protein, 129 aa, Homo sapiens
MAQVQLVESGGGLVQAGASLRLSCAASGGTFSSYAMAWFRQAPGKEREFVAEDSWSNHRVWYSDSVKGRFTISRDNAKNMVYLQMNNLKPEDTAVYYCAAYRDYSGSTVDPPNQSEYDYWGQGTQVTVS

SEQ ID NO: 685 - protein, 129 aa, Homo sapiens
MAQVQLVESGGGLVQAGASLRLSCAASGGTFSSYAMAWFRQAPGKEREFVAEDSWSNHRVWYSDSVKGRFIISRDNAKNTVYLQMNNLKPEDTAVYYCAAYRDYSGSTVDPPNQSEYDYWGQGTQVTVS

SEQ ID NO: 686 - protein, 129 aa, Homo sapiens
MAQVQLVESGGGLVQAGASLRLSCAASGGTFSSYAMAWFRQAPGKEREFVAEDSWSNHRVWYSDSVKGQFTISRDNAKNTVYLQMNNLKPEDTAVYYCAAYRDYSGSTVDPPNQSEYDYWGQGTQVTVS

SEQ ID NO: 687 - protein, 129 aa, Homo sapiens
MAQVQLVESGGGLVQAGASLRLSCAASGGTFSSYAMAWFRQAPGKEREFVAEDSWSNHRVWYSDSAKGRFTISRDNAKNTVYLQMNNLKPEDTAVYYCAAYRDYSGSTVDPPNQSEYDYWGQGTQVTVS

SEQ ID NO: 688 - protein, 129 aa, Homo sapiens
MAQVQLVESGGGLVQAGASLRLSCAASGGTFSSYAMAWFRQAPGKEREFVAEDSWSNHRVWFSDSVKGRFTISRDNAKNTVYLQMNNLKPEDTAVYYCAAYRDYSGSTVDPPNQSEYDYWGQGTQVTVS

SEQ ID NO: 689 - protein, 129 aa, Homo sapiens
MAQVQLVESGGGLVQAGASLRLSCAASGGTFSSYAMAWFRQAPGKEREFVAEDSWSNHRVWCSDSVKGRFTISRDNAKNTVYLQMNNLKPEDTAVYYCAAYRDYSGSTVDPPNQSEYDYWGQGTQVTVS

SEQ ID NO: 690 - protein, 129 aa, Homo sapiens
MAQVQLVESGGGLVQAGASLRLSCAASGGTFSSYAMAWFRQAPGKEREFVAEDSWSNHMVWYSDSVKGRFTISRDNAKNTVYLQMNNLKPEDTAVYYCAAYRDYSGSTVDPPNQSEYDYWGQGTQVTVS

SEQ ID NO: 691 - protein, 129 aa, Homo sapiens
MAQVQLVESGGGLVQAGASLRLSCAASGGTFSSYAMAWFRQAPGKEREFVAEDPWSNHRVWYSDSVKGRFTISRDNAKNTVYLQMNNLKPEDTAVYYCAAYRDYSGSTVDPPNQSEYDYWGQGTQVTVS

SEQ ID NO: 692 - protein, 129 aa, Homo sapiens
MAQVQLVESGGGLVQAGASLRLSCAASGGTFSSYAMAWFRQAPGKECEFVAEDSWSNHRVWYSDSVKGRFTISRDNAKNTVYLQMNNLKPEDTAVYYCAAYRDYSGSTVDPPNQSEYDYWGQGTQVTVS

SEQ ID NO: 693 - protein, 129 aa, Homo sapiens
MAQVQLVESGGGLVQAGASLRLSCAASGGTFSSYAMAWFHQAPGKEREFVAEDSWSNHRVWYSDSVKGRFTISRDNAKNTVYLQMNNLKPEDTAVYYCAAYRDYSGSTVDPPNQSEYDYWGQGTQVTVS

SEQ ID NO: 694 - protein, 129 aa, Homo sapiens
MAQVQLVESGGGLVQAGASLRLSCAASGDTFSSYAMAWFRQAPGKEREFVAEDSWSNHRVWYSDSVKGRFTISRDNAKNTVYLQMNNLKPEDTAVYYCAAYRDYSGSTVDPPNQSEYDYWGQGTQVTVS

SEQ ID NO: 695 - protein, 130 aa, Homo sapiens
MAQVQLVESGGGLVQAEGSLRLSCAASGRPFSSLDMGWFRQAPGKEREFVATISWTGGSTYYADSVKGRFTISRDNAKNTVYLQMNSLKPEDTAVYYCAARGGGTSVDSDYDVEEFEYDYWGQGTQVTVS

SEQ ID NO: 696 - protein, 130 aa, Homo sapiens
MAQVQLVESGGGLVLAGGSLRLSCAASGRPFSSLDMGWFRQRPGKERDVVATINWTGDSTYYLDSVKGRFTISRDNAKNTVFLQMNSLKPEDTAVYYCAARGGGSSVDSEYDVGEFEYDYWGQGTQVTVS

SEQ ID NO: 697 - protein, 125 aa, Homo sapiens
MAQVQLVESGGGLVESGGSLRLSCTASGFTLDYYAIGWFRQAPGKEREGVSCISSSYSRTTYADSVKGRFTISRDKSKNMIYLQMNSLKPEDTAVYYCATRTLDGLECGGSHYDYFGQGTQVTVS

SEQ ID NO: 698 - protein, 129 aa, Homo sapiens
MAQVQLVESGGGLVEPGASLRLSCTASGFALDFYAIAWFRQAPGKEREAVSCKSSDSDGNTYYAESVEGRFTISRDNAKNTHYLQMDSLKPEDTAVYYCATGYYTDSLRCSANMHEYDTWGQGTQVTVS

SEQ ID NO: 699 - protein, 130 aa, Homo sapiens
MAQVQLVESGGGLAQAGGSLRLSCAASGRTFSSDAMAWFRQAPGKERDFVATISWTGGSTYYADSVKGRFTISRDNAKNTVYLQMNSLKPEDTAVYYCAARGGGTSVDSDYDVEEFEYDYWGQGTQVTVS

SEQ ID NO: 700 - protein, 130 aa, Homo sapiens
MAQVQLVESGGGLAQAGGSLRLSCAASGRPFNMYDMGWFRQALGKEREFVATVSWTGSSTNYADSVKGRFTISRDNAKNTVYLEMNSLKPEDTAVYYCAARGGGTSVDSDYDVGEFEYDYWGQGTQVTVS

SEQ ID NO: 701 - protein, 130 aa, Homo sapiens
MAQVQLVESGGGKVQAGDSLRLSCTFSGGAFSRHAVGWFRQAPGKDRDFVAGISWSGRSTDYVNSVKGRFTISRDNAKNTVFLQMNSLKPEDTAVYYCAARGGGSSVDSEYDVGEFEYDYWGQGTQVTVS

SEQ ID NO: 702 - protein, 127 aa, Homo sapiens
MAQVQLVESGGGFVQAGGSLRLSCTASGRTFSTYTMAWFRQAPGKEREFVAAISWSGAYYAESVKGRFTISRDNAKNTVYLQMNSLKPEDTAVYYCAAVIGSTVDSYSPSDPLEYDYWGQGTQVTVS

SEQ ID NO: 703 - protein, 130 aa, Homo sapiens
MAQVQLVESGGGFVQAGGSLRLSCAASGRPFSSLDMGWFRQRPGKERDVVATINWTGDSTYYLDSVKGRFTISRDNAKNTVFLQMNSLKPEDTAVYYCAARGGGSSVDSEYDVGEFEYDYWGQGTQVTVS

SEQ ID NO: 704 - protein, 129 aa, Homo sapiens
MAQVQLVESGGELVQSGSSLRLSCAASGFDLDDYAIGWFRQAPGKEREGVSCTSTSDGPTSYLDSVKGRFTISRDNAKNTVYLQMNNLKPEDTAVYYCAAYRDYSGSTVDPPNQSEYDYWGQGTQVTVS

SEQ ID NO: 705 - protein, 130 aa, Homo sapiens
MAQVQLVESGGELVQAGGSLRLSCAASGRPFSSLDMGWFRQRPGKERDVVATINWTGDSTYYLDSVKGRFTISRDNAKNTVFLQMNSLKPEDTAVYYCAARGGGSSVDSEYDVGEFEYDYWGQGTQVTVS

SEQ ID NO: 706 - protein, 129 aa, Homo sapiens
MAQVQLVESGGCLVQAGASLRLSCAASGGTFSSYAMAWFRQAPGKEREFVAEDSWSNHRVWYSDSVKGRFTISRDNAKNTVYLQMNNLKPEDTAVYYCAAYRDYSGSTVDPPNQSEYDYWGQGTQVTVS

SEQ ID NO: 707 - protein, 130 aa, Homo sapiens
MAQVQLVESGEGLVQAGGSLRLSCAASGRPFSSLDMGWFRQRPGKERDVVATINWTGDSTYYLDSVKGRFTISRDNAKNTVFLQMNSLKPEDTAVYYCAARGGGSSVDSEYDVGEFEYDYWGQGTQVTVS

SEQ ID NO: 708 - protein, 129 aa, Homo sapiens
MAHVQLVESGRGLVQAGASLRLSCAASGGTFSSYAMAWFRQAPGKEREFVAEDSWSNHRVWYSDSVKGRFTISRDNAKNTVYLQMNNLKPEDTAVYYCAAYRDYSGSTVDPPNQSEYDYWGQGTQVTVS

SEQ ID NO: 709 - protein, 120 aa, Homo sapiens
MAHVQLVESGGSVRVSCVSSGFILDYYAIGWFRQAPGKEREGVSCIDSVGRAYYVDSVKGRFTISRDNAKNTVYLQMNSLKPEDTAVYYCAADFGSSVDSTCLNNQQYDYWGQGTQVTVS

SEQ ID NO: 710 - protein, 127 aa, Homo sapiens
MAHVQLVESGGRLVQAGGSLRLSCTASGRTFSTYTMAWFRQAPGKEREFVAAISWSGAYYAESVKGRFTISRDNAKNTVYLQMNSLKPEDTAVYYCAAVIGSTVDSYSPSDPLEYDYWGQGTQVTVS

SEQ ID NO: 711 - protein, 129 aa, Homo sapiens
MAHVQLVESGGRLVQAGGSLRLSCAASGRTFTHLNMGWFRQAPGKEREFTAHINWSGGSTNYVDSVKGRFTISRDNAKNTVYLQMNSLKPEDTAVYYCAATLGDSVDLDSDADPRGYDYWGQGTQVTVS

SEQ ID NO: 712 - protein, 129 aa, Homo sapiens
MAHVQLVESGGRLVQAGGSLRLSCAASGRTFTHLNMGWFRQAPGKEREFTAHINWSGGSTNYADSVKGRFTISRDNAKNTVYLQMNSLKPEDTAVYYCAATLGDSVDLDSDADPRGYDYWGQGTQVTVS

SEQ ID NO: 713 - protein, 129 aa, Homo sapiens
MAHVQLVESGGRLVQAGGSLRLSCAASGRTFTHLNMGWFRQAPGKEREFTAHINWSGGSTNYADSVKGRFTISRDNAKNTVYLQMNSLKPEDTAVYYCAATLGDSVDLDSDADPRGYDYGGQGTQVTVS

SEQ ID NO: 714 - protein, 129 aa, Homo sapiens
MAHVQLVESGGRLVQAGGSLRLSCAASGRTFTHLNMGWFRQAPGKEREFTAHINWSGGSTNYADSVKGRFTISRDNAKNTVYLQMNSLKPDDTAVYYCAATLGDSVDLDSDADPRGYDYWGQGTQVTVS

SEQ ID NO: 715 - protein, 129 aa, Homo sapiens
MAHVQLVESGGRLVQAGDSLKLSCAASGRTFSTYTMGWFRQAPGKEREFVAGTSPSGDNRNYGDSVKGRFSISRDNARNTMYLQMNSLKPEDTAVYFCAAFRGSCVDYGCDFRVSQYDYWGQGTQVTVS

SEQ ID NO: 716 - protein, 126 aa, Homo sapiens
MAHVQLVESGGKLVQAGGSLRLSCAVSGVSFRNMGWFRQAPGKEREFVAAISWSGDSTVYADSVKGRVTISRDNAKNTVHLEMNSLKPEDTAVYYCAADGRFRAGRIGTSLGLYHYWGQGTQVTVS

SEQ ID NO: 717 - protein, 127 aa, Homo sapiens
MAHVQLVESGGGSVQAGGSLRLSCTASGRTFSTYTVAWFRQAPGKEREFVAAISWSGAYYADSVTGRFTISRDNAKNTVYLQMNSLKPEDTAVYYCAAVIGSTVDSYRPGDPLEYDYWGQGTQVTVS

SEQ ID NO: 718 - protein, 127 aa, Homo sapiens
MAHVQLVESGGGSVQAGGSLRLSCTASGRTFSTYTMAWFRQAPGKEREFVAAISWSGAYYAESVKGRFTISRDNAKNTVYLQMNSLKPEDTAVYYCAAVIGSTVDSYSPSDPLEYDYWGQGTQVTVS

SEQ ID NO: 719 - protein, 127 aa, Homo sapiens
MAHVQLVESGGGSVQAGGSLRLSCTASGRTFSTYTMAWFRQAPGKEREFVAAISWSGAYYADSVTGRFTISRDNAKNTVYLQMNSLKPEDTAVYYCAAVIGSTVDSYRTGDPLEYDYWGQGTQVTVS

SEQ ID NO: 720 - protein, 127 aa, Homo sapiens
MAHVQLVESGGGSVQAGGSLRLSCTASGRTFSTYTMAWFRQAPGKEREFVAAISWSGAYYADSVTGRFTISRDNAKNTVYLQMNSLKPEDTAVYYCAAVIGSTVDSYRPGDPLEYDYWGQGTQVTVS

SEQ ID NO: 721 - protein, 127 aa, Homo sapiens
MAHVQLVESGGGSVQAGGSLRLSCTASGRTFSTYTMAWFRQAPGKEREFVAAISWSGAYYADSVTGRFTISRDNAKNTVYLQMNSLKPEDMAVYYCAAVIGSTVDSYRPGDPLEYDYWGQGTQVTVS

SEQ ID NO: 722 - protein, 127 aa, Homo sapiens
MAHVQLVESGGGSVQAGGSLRLSCTASGRTFSTYTMAWFRQAPGKEREFVAAISWSGAYYADSVTGRFTISRDNAKNTMYLQMNSLKPEDTAVYYCAAVIGSTVDSYRPGDPLEYDYWGQGTQVTVS

SEQ ID NO: 723 - protein, 127 aa, Homo sapiens
MAHVQLVESGGGSVQAGGSLRLSCTASGRTFSTYTMAWFRQAPGKEREFVAAISWSGAYYADSVTDRFTISRDNAKNTVYLQMNSLKPEDTAVYYCAAVIGSTVDSYRPGDPLEYDYWGQGTQVTVS

SEQ ID NO: 724 - protein, 127 aa, Homo sapiens
MAHVQLVESGGGSVQAGGSLRLSCTASGRTFSTYTMAWFRQAPGKEREFEAAISWSGAYYADSVTGRFTISRDNAKNTVYLQMNSLKPEDTAVYYCAAVIGSTVDSYRPGDPLEYDYWGQGTQVTVS

SEQ ID NO: 725 - protein, 132 aa, Homo sapiens
MAHVQLVESGGGSVQAGGSLRLSCAASGRTFSSLRMAWFRQAPGKEREFVAENWWNGQGGQGVWYVDSVKGRFTISRDNAKNTLYLQMNNLKPEDTAVYYCAAHRDDSGSTVDPPNQSDYDYWGQGTQVTVS

SEQ ID NO: 726 - protein, 130 aa, Homo sapiens
MAHVQLVESGGGSVQAGGSLRLSCAASGRPFSSLDMGWFRQRPGKERDVVATINWTGDSTYYLDSVKGRFTISRDNAKNTVFLQMNSLKPEDTAVYYCAARGGGSSVDSEYDVGEFEYDYWGQGTQVTVS

SEQ ID NO: 727 - protein, 127 aa, Homo sapiens
MAHVQLVESGGGSVQAGDSLRLSCTASGRTFSTYTMAWFRQAPGKEREFVAAISWSGAYYADSVTGRFTISRDNAKNTVYLQMNSLKPEDTAVYYCAAVIGSTVDSYRPGDPLEYDYWGQGTQVTVS

SEQ ID NO: 728 - protein, 130 aa, Homo sapiens
MAHVQLVESGGGSVQAGDSLRLSCAASGRPFSSLDMGWFRQRPGKERDVVATINWTGDSTYYLDSVKGRFTISRDNAKNTVFLQMNSLKPEDTAVYYCAARGGGSSVDSEYDVGEFEYDYWGQGTQVTVS

SEQ ID NO: 729 - protein, 128 aa, Homo sapiens
MAHVQLVESGGGPVQAGGSLRLSCAASGRTFSTYVMAWFRQAPGKEREFVAAISWNGSTYYADSVKGRFTISRDNAKNTVYLQMNSLSPEDTAVYYCAAAIGSTVDSYSPSDPLEYDYWGQGTQVTVS

SEQ ID NO: 730 - protein, 128 aa, Homo sapiens
MAHVQLVESGGGPVQAGGSLRLSCAASGRTFSTYVMAWFRQAPGKEREFVAAISWNGSTYYADSVKGRFTISRDNAKNTVYLQMNSLSPEDTAVYYCAAAIGSTVDSYSPSDPLAYDYWGQGTQVTVS

SEQ ID NO: 731 - protein, 129 aa, Homo sapiens
MAHVQLVESGGGPVQAGGSLRLSCAASGRTFSTYVMAWFRQAPGKEREFVAAISWNGGSTYYADSVKGRFTISRDNTKNTVYLQMNSLSPEDTAVYYCAAAIGSTVDSYSPSDPLEYDYWGQGTQVTVS

SEQ ID NO: 732 - protein, 130 aa, Homo sapiens
MAHVQLVESGGGLVRAGGSLRLSCAASGRPFSSLDMGWFRQRPGKERDVVATINWTGDSTYYLDSVKGRFTISRDNAKNTVFLQMNSLKPEDTAVYYCAARGGGSSVDSEYDVGEFEYDYWGQGTQVTVS

SEQ ID NO: 733 - protein, 127 aa, Homo sapiens
MAHVQLVESGGGLVQTGGSLRLSCTASGRTFSTYTMAWFRQAPGKEREFVAAISWSGTYYADSVKGRFTISRDNAKNTVYLQMNSLKPEDTAVYYCAAVIGSTVDSYSPSDPLEYDYWGQGTQVTVS

SEQ ID NO: 734 - protein, 126 aa, Homo sapiens
MAHVQLVESGGGLVQTGGSLRLSCAASTRTFSDYTMGWFRRAPGKEREFVATISTGGGSRKYGDSVVGRFTISRDNAKNMVYLQMNSLKPEDTAVYYCAASHRGYYSGSYSREYDFWGQGTQVTVS

SEQ ID NO: 735 - protein, 126 aa, Homo sapiens
MAHVQLVESGGGLVQTGGSLRLSCAASTRTFSDYTMGWFRRAPGKEREFVATISTGGGSRKYADSVTGRFTISRDNAKNMVYLQMNSLKPEDTAVYYCAASLRGYYSGSYSREYDLWGQGTQVTVS

SEQ ID NO: 736 - protein, 130 aa, Homo sapiens
MAHVQLVESGGGLVQTGGSLRLSCAASGRPFSSLDMGWFRQRPGKERDVVATINWTGDSTYYLDSVKGRFTISRDNAKNTVFLQMNSLKPEDTAVYYCAARGGGSSVDSEYDVGEFEYDYWGQGTQVTVS

SEQ ID NO: 737 - protein, 130 aa, Homo sapiens
MAHVQLVESGGGLVQTGGSLRLSCAASGRPFSSLDMGWFRQAPGKEREFVATISWTGGSTYYADSVKGRFTISRDNAKNTVYLQMNSLKPEDTAVYYCAARGGGTSVDSDYDVEEFEYDYWGQGTQVTVS

SEQ ID NO: 738 - protein, 130 aa, Homo sapiens
MAHVQLVESGGGLVQTGGSLRLSCAASGRPFNMYDMGWFRQALGKEREFVATVSWTGSSTNYADSVKGRFTISRDNAKNTVYLEMNSLKPEDTAVYYCAARGGGTSVDSDYDVGEFEYDYWGQGTQVTVS

SEQ ID NO: 739 - protein, 127 aa, Homo sapiens
MAHVQLVESGGGLVQTGGSLRLSCAASGRAFSTYVMAWFRQAPGKEREFVAAINWSSTYYADSVKGRSTISRDNAKNTVYLEMNSLEPEDTAVYYCAAAIGSTVDSYSPSDPLEYDYWGQGTQVTVS

SEQ ID NO: 740 - protein, 126 aa, Homo sapiens
MAHVQLVESGGGLVQTGDSLRLSCAASTRTFSDYTMGWFRRAPGKEREFVATISTGGGSRKYGDSVVGRFTISRDNAKNMVYLHMNSLKPEDTAVYYCAASLRGYYSGSYSREYDLWGQGTQVTVS

SEQ ID NO: 741 - protein, 125 aa, Homo sapiens
MAHVQLVESGGGLVQSGGSLRLSCTASGFTLDYYAIGWFRQAPGKEREGVSCISSSYGRTTYADSVKGRFTISRDKSKNMIYLQMNSLKPEDTAVYYCATRTLDGLECGGSHYDYVGQGTQVTVS

SEQ ID NO: 742 - protein, 125 aa, Homo sapiens
MAHVQLVESGGGLVQSGGSLRLSCTASGFTLDYYAIGWFRQAPGKEREGVSCISSSYGRTTYADSVKGRFTISRDKSKNMIYLQMNSLKPEDTAVYYCATRTLDGLECGGSHYDYFGQGTQVTVS

SEQ ID NO: 743 - protein, 125 aa, Homo sapiens
MAHVQLVESGGGLVQSGGSLRLSCTASGFTLDYYAIGWFRQAPGKEREGVSCISSSYGRTTYADSVKGRFTISRDKSKNMIYLQMNSLKPEDTAVYYCATRTLDGLECGGSHYDYCGQGTQVTVS

SEQ ID NO: 744 - protein, 125 aa, Homo sapiens
MAHVQLVESGGGLVQSGGSLRLSCTASGFTLDYYAIGWFRQAPGKEREGVSCISSSYGRTTYADSVKDRFTISRDKSKNMIYLQMNSLKPEDTAVYYCATRTLDGLECGGSHYDYFGQGTQVTVS

SEQ ID NO: 745 - protein, 130 aa, Homo sapiens
MAHVQLVESGGGLVQSGGSLRLSCAASGRPFSSLDMGWFRQRPGKERDVVATINWTGDSTYYLDSVKGRFTISRDNAKNTVFLQMNSLKPEDTAVYYCAARGGGSSVDSEYDVGEFEYDYWGQGTQVTVS

SEQ ID NO: 746 - protein, 127 aa, Homo sapiens
MAHVQLVESGGGLVQPGGSVRVSCVSSGFILDYYVIGWFRQAPGKEREGVSCIDSVGRAYYVDSVKGRFTISRDNAKNTVYLQMNSLKPEDTAVYYCAADFGSSVDSTCLNNQQYDYWGQGTQVTVS

SEQ ID NO: 747 - protein, 127 aa, Homo sapiens
MAHVQLVESGGGLVQPGGSVRVSCVSSGFILDYYAIGWFRQAPGKEREGVSCIDSVGRAYYVDSVKGRFTISRDNVKNTVYLQMNSLKPEDTAVYYCAADFGSSVDSTCLNNQQYDYWGQGTQVTVS

SEQ ID NO: 748 - protein, 127 aa, Homo sapiens
MAHVQLVESGGGLVQPGGSVRVSCVSSGFILDYYAIGWFRQAPGKEREGVSCIDSVGRAYYVDSVKGRFTISRDNAKNTVYLQMNSLKPEDTTVYYCAADFGSSVDSTCLNNQQYDYWGQGTQVTVS

SEQ ID NO: 749 - protein, 127 aa, Homo sapiens
MAHVQLVESGGGLVQPGGSVRVSCVSSGFILDYYAIGWFRQAPGKEREGVSCIDSVGRAYYVDSVKGRFTISRDNAKNTVYLQMNSLKPEDTAVYYCAADFGSSVDSTCLNNQQYDYWGQGTQVTVS

SEQ ID NO: 750 - protein, 127 aa, Homo sapiens
MAHVQLVESGGGLVQPGGSVRVSCVSSGFILDYYAIGWFRQAPGKEREGVSCIDSVGRAYYVDSVKGRFTISRDNAKNTVYLQMNSLKPEDTAVYYCAADFGSSVDSTCLNNQQYDYWDQGTQVTVS

SEQ ID NO: 751 - protein, 127 aa, Homo sapiens
MAHVQLVESGGGLVQPGGSVRVSCVSSGFILDYYAIGWFRQAPGKEREGVSCIDSVGRAYYVDSVKGRFTISRDNAKNTVYLQMNSLKPEDTAVYYCAADFGSSVDSTCLNNQQYDDWGQGTQVTVS

SEQ ID NO: 752 - protein, 127 aa, Homo sapiens
MAHVQLVESGGGLVQPGGSVRVSCVSSGFILDYYAIGWFRQAPGKEREGVSCIDSVGRAYYVDSVKGRFTISRDNAKNTVYLQMNSLKPEDTAVYYCAADFGSSVDSTCLNKQQYDYWGQGTQVTVS

SEQ ID NO: 753 - protein, 127 aa, Homo sapiens
MAHVQLVESGGGLVQPGGSVRVSCVSSGFILDYYAIGWFRQAPGKEREGVSCIDSVGRAYYVDSVKGRFTISKDNAKNTVYLQMNSLKPEDTAVYYCAADFGSSVDSTCLNNQQYDYWGQGTQVTVS

SEQ ID NO: 754 - protein, 127 aa, Homo sapiens
MAHVQLVESGGGLVQPGGSVRVSCVSSGFILDYYAIGWFRQAPGKEREGVSCIDSVGRAYYVDSVKGRFAISRDNAKNTVYLQMNSLKPEDTAVYYCAADFGSSVDSTCLNNQQYDYWGQGTQVTVS

SEQ ID NO: 755 - protein, 127 aa, Homo sapiens
MAHVQLVESGGGLVQPGGSVRVSCVSSGFILDYYAIDWFRQAPGKEREGVSCIDSVGRAYYVDSVKGRFTISRDNAKNTVYLQMNSLKPEDTAVYYCAADFGSSVDSTCLNNQQYDYWGQGTQVTVS

SEQ ID NO: 756 - protein, 127 aa, Homo sapiens
MAHVQLVESGGGLVQPGGSVRVSCVSSGFIFDYYAIGWFRQAPGKEREGVSCIDSVGRAYYVDSVKGRFTISRDNAKNTVYLQMNSLKPEDTAVYYCAADFGSSVDSTCLNNQQYDYWGQGTQVTVS

SEQ ID NO: 757 - protein, 128 aa, Homo sapiens
MAHVQLVESGGGLVQPGGSLRLSCVSSGFIFDYYAIGWFRQAPGKEREGVSCISSVGRAYYIDSVKGRFTISRDNAKNTVYLQMNSLKPEDTAVYYCAADFGSSVDSTCLSKEQRFDYWGQGTQVTVS

SEQ ID NO: 758 - protein, 128 aa, Homo sapiens
MAHVQLVESGGGLVQPGGSLRLSCTSSGSIFSMDVMGWYRQAPGKQRELVASITSGGIENYGDSVKGRFTISRDNAKNTVYLQMNSLKPEDTAVYYCAAVIGSTVDSYSPSDPLEYDYWGQGTQVTVS

SEQ ID NO: 759 - protein, 122 aa, Homo sapiens
MAHVQLVESGGGLVQPGGSLRLSCTASGYPISTYAMGWVRQAPGKGPEWVATIYYSGVTHYRNSVKGRFTISRDNAKNTLHLQMNSLKPEDTAVYYCAKGVNGTYLRVEAEYRGQGTQVTVS

SEQ ID NO: 760 - protein, 127 aa, Homo sapiens
MAHVQLVESGGGLVQPGGSLRLSCTASGRTFSTYTMAWFRQAPGKEREFVAAITWSTTYYADSVKGRFTISRDNAKNTMYLQMNNLKPEDTAVYICAAVIGSTVDSYSPSDPLEYDYWGQGTQVTVS

SEQ ID NO: 761 - protein, 127 aa, Homo sapiens
MAHVQLVESGGGLVQPGGSLRLSCTASGRTFSTYTMAWFRQAPGKEREFVAAITWSGTYYADSVKGRFTISRDNAKNTMYLQMNSLKPEDTAVYICAAVIGSTVDSYSPSDPLEYDYWGQGTQVTVS

SEQ ID NO: 762 - protein, 127 aa, Homo sapiens
MAHVQLVESGGGLVQPGGSLRLSCTASGRTFSTYTMAWFRQAPGKEREFVAAISWSGTYYADSVKGRFTISRDNAKNTVYLQMNSLKPEDTAVYYCAAVIGSTVDSYSPSDPLEYDYWGQGTQVTVS

SEQ ID NO: 763 - protein, 127 aa, Homo sapiens
MAHVQLVESGGGLVQPGGSLRLSCTASGRTFSTYTMAWFRQAPGKEREFVAAISWSGAYYAESVKGRFTISRDNAKNTVYLQMNSLKPEDTAVYYCAAVIGSTVDSYSPSDPLEYDYWGQGTQVTVS

SEQ ID NO: 764 - protein, 125 aa, Homo sapiens
MAHVQLVESGGGLVQPGGSLRLSCTASGFTLDYYAIGWFRQAPGKEREGVSCISSSYGRTTYADSVKGRFTISRDKSKNMIYLQMNSLKPEDTAVYYCATRTLDGLECGGSHYDYFGQGTQVTVS

SEQ ID NO: 765 - protein, 130 aa, Homo sapiens
MAHVQLVESGGGLVQPGGSLRLSCAASGRPFSSLDMGWFRQRPGKERDVVATINWTGDSTYYLDSVKGRFTISRDNAKNTVFLQMNSLKPEDTAVYYCAARGGGSSVDSEYDVGEFEYDYWGQGTQVTVS

SEQ ID NO: 766 - protein, 130 aa, Homo sapiens
MAHVQLVESGGGLVQPGGSLRLSCAASGRPFSSLDMGWFRQAPGKEREFVATISWTGGSTYYADSVKGRFTISRDNAKNTVYLQMNSLKPEDTAVYYCAARGGGTSVDSDYDVEEFEYDYWGQGTQVTVS

SEQ ID NO: 767 - protein, 130 aa, Homo sapiens
MAHVQLVESGGGLVQPGGSLRLSCAASGRPFSSLDMGWFRQAPGKERDIVATISWTGGSTYYADSVKGRFTISRDNAKNTVYLQMNSLKPEDTAVYYCAARGGGTSVDSDYDVEEFDYDYWGQGTQVTVS

SEQ ID NO: 768 - protein, 130 aa, Homo sapiens
MAHVQLVESGGGLVQPGGSLRLSCAASGRPFNMYDMGWFRQALGKEREFVATVSWTGSSTNYADSVKGRFTISRDNAKNTVYLEMNSLKPEDTAVYYCAARGGGTSVDSDYDVGEFEYDYWGQGTQVTVS

SEQ ID NO: 769 - protein, 129 aa, Homo sapiens
MAHVQLVESGGGLVQPGGSLRLSCAASGGTFSSYAMAWFRQAPGKEREFVAEDSWSNHRVWYSDSVKGRFTISRDNAKNTVYLQMNNLKPEDTAVYYCAAYRDYSGSTVDPPNQSEYDYWGQGTQVTVS

SEQ ID NO: 770 - protein, 132 aa, Homo sapiens
MAHVQLVESGGGLVQPGGSLRLSCAASGFTSDYYVISWFRQAPGKEREGVSCISSSDTYYADSVKGRFTISRDNAKNTVYLQMNSLKPEDTAVYYCATAAIWDPSGLAVCGSSWYRRGWWDYWGQGTQVTVS

SEQ ID NO: 771 - protein, 127 aa, Homo sapiens
MAHVQLVESGGGLVQPGGSLRLSCAASGFTLDYYIIAWFRQAPGKEREGVSCIHSSDGSTYYADSVKGRFTISRDNAKNTVYLQMNSLKPEDTAVYYCATHEEMDSDLCHHISEYDYWGQGTQVTVS

SEQ ID NO: 772 - protein, 125 aa, Homo sapiens
MAHVQLVESGGGLVQPGGSLRLSCAASGFTLDYYAIGWFRQAPGKEREGVSCISSSYGRTTYADSVKGRFTISRDKAKNMVYLQMNSLKPEDTAVYYCATRTLDGLECGGSHYDYFGQGTQVTVS

SEQ ID NO: 773 - protein, 130 aa, Homo sapiens
MAHVQLVESGGGLVQPGGSLRLSCAASGFTLDYYAIGWFRQAPGKEREGVSCISSSDGSTYYADSVKGRFTISRDNAKNTVYLQMNSLKPEDTAVYYCAARGGGTSVDSDYDVEEFEYDYWGQGTQVTVS

SEQ ID NO: 774 - protein, 128 aa, Homo sapiens
MAHVQLVESGGGLVQPGGSLRLSCAASGFTLDYYAIGWFRQAPGKEREGVSCISSSDGSTYYADSVKGRFTISRDNAKNTVYLQMNSLKPEDTAVYYCAADFGSSVDSTCLNNQQYDYWGQGTQVTVS

SEQ ID NO: 775 - protein, 130 aa, Homo sapiens
MAHVQLVESGGGLVQPGGSLRLSCAASGFTLDYYAIGWFRQAPGKEREGVSCISSSDGSTYYADSVKGRFTISRDNAKNTVFLQMNSLKPEDTAVYYCAARGGGSSVDSEYDVGEFEYDYWGQGTQVTVS

SEQ ID NO: 776 - protein, 127 aa, Homo sapiens
MAHVQLVESGGGLVQPGGSLRLSCAASGFTLDYYAIGWFRQAPGKEREGVSCIDSVGRAYYVDSVKGRFTISRDNAKNTVYLQMNSLKPEDTAVYYCAADFGSSVDSTCLNNQQYDYWGQGTQVTVS

SEQ ID NO: 777 - protein, 127 aa, Homo sapiens
MAHVQLVESGGGLVQPGGSLRLSCAASGFTLDDYAIGWFRQAPGKEREGVSCISSHGSTYYADSVKGRFTISRDNVKNTLYLQMNSLKPEDTALYYCAASYYSDYEVAVCRSDALDAWGQGTQVTVS

SEQ ID NO: 778 - protein, 123 aa, Homo sapiens
MAHVQLVESGGGLVQPGGSLRLSCAASGFTFSTYAMGWVRQAPGKGPEWVATIYSKGDTTHYANSAKGRFTISRDNARNTLYLQMNSLKPEDTAVYYCAKGISDSYLRVESNYRGQGTQVTVS

SEQ ID NO: 779 - protein, 127 aa, Homo sapiens
MAHVQLVESGGGLVQPGASLRLSCTASGRTFSTYTMAWFRQAPGKEREFVAAISWSGTYYADSVKGRFTISRDNAKNTVYLQMNSLKPEDTAVYYCAAVIGSTVDSYSPSDPLEYDYWGQGTQVTVS

SEQ ID NO: 780 - protein, 130 aa, Homo sapiens
MAHVQLVESGGGLVQAWGSLRLSCAASGRPFSSLDMGWFRQRPGKERDVVATINWTGDSTYYLDSVKGRFTISRDNAKNTVFLQMNSLKPEDTAVYYCAARGGGSSVDSEYDVGEFEYDYWGQGTQVTVS

SEQ ID NO: 781 - protein, 129 aa, Homo sapiens
MAHVQLVESGGGLVQAVASLRLSCAASGGTFSSYAMAWFRQAPGKEREFVAEDSWSNHRVWYSDSVKGRFTISRDNAKNTVYLQMNNLKPEDTAVYYCAAYRDYSGSTVDPPNQSEYDYWGQGTQVTVS

SEQ ID NO: 782 - protein, 127 aa, Homo sapiens
MAHVQLVESGGGLVQARGSLRLSCTASGRTFSTYTMAWFRQAPGKEREFVAAISWSGTYYADSVKGRFTISRDNAKNTVYLQMNSLKPEDTAVYYCAAVIGSTVDSYSPSDPLEYDYWGQGTQVTVS

SEQ ID NO: 783 - protein, 127 aa, Homo sapiens
MAHVQLVESGGGLVQARGSLRLSCTASGRTFSTYTMAWFRQAPGKERDFVAAISWSGVYYADSVKGRFTISRDNVKNTMYLQMNNLKPEDTAVYYCAAVIGSTVDSYSPSDPLEYDYWGQGTQVTVS

SEQ ID NO: 784 - protein, 130 aa, Homo sapiens
MAHVQLVESGGGLVQARGSLRLSCAASGRPFSSLDMGWFRQRPGKERDVVATINWTGDSTYYLDSVKGRFTISRDNAKNTVFLQMNSLKPEDTAVYYCAARGGGSSVDSEYDVGEFEYDYWGQGTQVTVS

SEQ ID NO: 785 - protein, 127 aa, Homo sapiens
MAHVQLVESGGGLVQAGVSLRLSCTASGRTFSTYTMAWFRQAPGKEREFVAAISWSGTYYADSVKGRFTISRDNAKNTVYLQMNSLKPEDTAVYYCAAVIGSTVDSYSPSDPLEYDYWGQGTQVTVS

SEQ ID NO: 786 - protein, 127 aa, Homo sapiens
MAHVQLVESGGGLVQAGGSPRLSCTASGRTFSTYTMAWFRQAPGKEREFVAAISWSGTYYADSVKGRFTISRDNAKNTVYLQMNSLKPEDTAVYYCAAVIGSTVDSYSPSDPLEYDYWGQGTQVTVS

SEQ ID NO: 787 - protein, 127 aa, Homo sapiens
MAHVQLVESGGGLVQAGGSPRLSCTASGRTFSTYTMAWFRQAPGKEREFVAAISWSGAYYAESVKGRFTISRDNAKNTVYLQMNSLKPEDTAVYYCAAVIGSTVDSYSPSDPLEYDYWGQGTQVTVS

SEQ ID NO: 788 - protein, 126 aa, Homo sapiens
MAHVQLVESGGGLVQAGGSPRLSCAASGRSFSSLDMGWFRRAPGKEREFVAAISGSRGSTDYSDSVKGRFTISRDNAKNTVYLQMNRLKPEDAAVYYCAAGFGSVDGLEYPISYDDWGQGTQVTVS

SEQ ID NO: 789 - protein, 130 aa, Homo sapiens
MAHVQLVESGGGLVQAGGSPRLSCAASGRPFSSLDMGWFRQRPGKERDVVATINWTGDSTYYLDSVKGRFTISRDNAKNTVFLQMNSLKPEDTAVYYCAARGGGSSVDSEYDVGEFEYDYWGQGTQVTVS

SEQ ID NO: 790 - protein, 130 aa, Homo sapiens
MAHVQLVESGGGLVQAGGSPRLSCAASGRPFSSLDMGWFRQAPGKEREFVATISWTGGSTYYADSVKGRFTISRDNAKNTVYLQMNSLKPEDTAVYYCAARGGGTSVDSDYDVEEFEYDYWGQGTQVTVS

SEQ ID NO: 791 - protein, 130 aa, Homo sapiens
MAHVQLVESGGGLVQAGGSPRLSCAASGRPFNMYDMGWFRQALGKEREFVATVSWTGSSTNYADSVKGRFTISRDNAKNTVYLEMNSLKPEDTAVYYCAARGGGTSVDSDYDVGEFEYDYWGQGTQVTVS

SEQ ID NO: 792 - protein, 127 aa, Homo sapiens
MAHVQLVESGGGLVQAGGSLSLSCTASGRTFSTYTMAWFRQAPGKEREFVAAISWSGAYYAESVKGRFTISRDNAKNTVYLQMNSLKPEDTAVYYCAAVIGSTVDSYSPSDPLEYDYWGQGTQVTVS

SEQ ID NO: 793 - protein, 130 aa, Homo sapiens
MAHVQLVESGGGLVQAGGSLSLSCAASGRPFSSLDMGWFRQRPGKERDVVATINWTGDSTYYLDSVKGRFTISRDNAKNTVFLQMNSLKPEDTAVYYCAARGGGSSVDSEYDVGEFEYDYWGQGTQVTVS

SEQ ID NO: 794 - protein, 130 aa, Homo sapiens
MAHVQLVESGGGLVQAGGSLSLSCAASGRPFSSLDMGWFRQAPGKEREFVATISWTGGSTYYADSVKGRFTISRDNAKNTVYLQMNSLKPEDTAVYYCAARGGGTSVDSDYDVEEFEYDYWGQGTQVTVS

SEQ ID NO: 795 - protein, 130 aa, Homo sapiens
MAHVQLVESGGGLVQAGGSLRLSYAASGRPFSSLDMGWFRQRPGKERDVVATINWTGDSTYYLDSVKGRFTISRDNAKNTVFLQMNSLKPEDTAVYYCAARGGGSSVDSEYDVGEFEYDYWGQGTQVTVS

SEQ ID NO: 796 - protein, 130 aa, Homo sapiens
MAHVQLVESGGGLVQAGGSLRLSFAASGRPFSSLDMGWFRQRPGKERDVVATINWTGDSTYYLDSVKGRFTISRDNAKNTVFLQMNSLKPEDTAVYYCAARGGGSSVDSEYDVGEFEYDYWGQGTQVTVS

SEQ ID NO: 797 - protein, 133 aa, Homo sapiens
MAHVQLVESGGGLVQAGGSLRLSCVASVASGRTFGWYDMGWFRQAPGKEREFVATISWSGGSTYYADSVKGRSTISRDNAKNTVYLQMNSLKPEDTAVYYCAARGGGTSVDSDYDVGEFEYDYWGQGTQVTVS

SEQ ID NO: 798 - protein, 133 aa, Homo sapiens
MAHVQLVESGGGLVQAGGSLRLSCVASVASGRTFGWYDMGWFRQAPGKEREFVAAISWSGGSTYYADSVKGRSTISRDNAKNTVYLQMNSLKPEDTAVYYCAARGGGTSVDSDYDVGEFEYDYWGQGTQVTVS

SEQ ID NO: 799 - protein, 129 aa, Homo sapiens
MAHVQLVESGGGLVQAGGSLRLSCVASGRTFSTYTMGWFRQAPGKEREFVAHIGWSGSSTYYADSVKGRFTISRDNAKNTMYLQMNSLKPEDTAVYYCAVAIGSPVDSNRHSDPLEYDYWGQGTQVTVS

SEQ ID NO: 800 - protein, 129 aa, Homo sapiens
MAHVQLVESGGGLVQAGGSLRLSCVASGRTFSTYTMGWFRQAPGKEREFVAHIGWSGSSTYYADSVKDRFTISRDNAKNTMYLQMNSLKPEDTAVYYCAVAIGSPVDSYRHSDPLEYDYWGQGTQVTVS

SEQ ID NO: 801 - protein, 127 aa, Homo sapiens
MAHVQLVESGGGLVQAGGSLRLSCVASGRTFRTYTMGWFRQAPGKEREFVAHIGWSSTDYADSVKGRFTISRDNAKNTMYLQMNSLKPEDTAVYYCAVAIGSPVDSYRHSDPLEYDYWGQGTQVTVS

SEQ ID NO: 802 - protein, 130 aa, Homo sapiens
MAHVQLVESGGGLVQAGGSLRLSCVASGRPFSSLDMGWFRQRPGKERDVVATINWTGDSTYYLDSVKGRFTISRDNAKNTVFLQMNSLKPEDTAVYYCAARGGGSSVDSEYDVGEFEYDYWGQGTQVTVS

SEQ ID NO: 803 - protein, 130 aa, Homo sapiens
MAHVQLVESGGGLVQAGGSLRLSCVASGRPFSSLDMGWFRQAPGKEREFVATISWTGGSTYYADSVKGRFTISRDNAKNTVYLQMNSLKPEDTAVYYCAARGGGTSVDSDYDVEEFEYDYWGQGTQVTVS

SEQ ID NO: 804 - protein, 130 aa, Homo sapiens
MAHVQLVESGGGLVQAGGSLRLSCVASGRPFNMYDMGWFRQALGKEREFVATVSWTGSSTNYADSVKGRFTISRDNAKNTVYLEMNSLKPEDTAVYYCAARGGGTSVDSDYDVGEFEYDYWGQGTQVTVS

SEQ ID NO: 805 - protein, 127 aa, Homo sapiens
MAHVQLVESGGGLVQAGGSLRLSCVASGGTFSSYDMGWFRQAPGKEREFVAAINWSGGSTDYPDSVKGRFTISRDNAKNTVYLQMNGLKPEDTAVYYCASRWRSGVDPYYYAGTYDYWGQGTQVTVS

SEQ ID NO: 806 - protein, 127 aa, Homo sapiens
MAHVQLVESGGGLVQAGGSLRLSCTASGRTFSTYVMAWFRQAPGKEREFVAAINWSGTYYADSVKGRFTISRDNAKNTVYLQMNSLKPEDTAVYYCAAVIGSTVDNYSPSDPLEYDYWGQGTQVTVS

SEQ ID NO: 807 - protein, 127 aa, Homo sapiens
MAHVQLVESGGGLVQAGGSLRLSCTASGRTFSTYTMAWLRQAPGKEREFVAAIAWSGAYYADSVKGRFTISRDNAKNTVYLQMNSLKPEDTAVYICAAAIGSTVDSYSPSDPLEYDYWGQGTQVTVS

SEQ ID NO: 808 - protein, 127 aa, Homo sapiens
MAHVQLVESGGGLVQAGGSLRLSCTASGRTFSTYTMAWFRRAPGKEREFVAAISWSGAYYAESVKGRFTISRDNAKNTVYLQMNSLKPEDTAVYYCAAVIGSTVDSYSPSDPLEYDYWGQGTQVTVS

SEQ ID NO: 809 - protein, 127 aa, Homo sapiens
MAHVQLVESGGGLVQAGGSLRLSCTASGRTFSTYTMAWFRQAPWKEREFVAAISWSGAYYAESVKGRFTISRDNAKNTVYLQMNSLKPEDTAVYYCAAVIGSTVDSYSPSDPLEYDYWGQGTQVTVS

SEQ ID NO: 810 - protein, 127 aa, Homo sapiens
MAHVQLVESGGGLVQAGGSLRLSCTASGRTFSTYTMAWFRQAPGKVREFVAAISWSGTYYADSVKGRFTISRDNAKNTVYLQMNSLKPEDTAVYYCAAVIGSTVDSYSPSDPLEYDYWGQGTQVTVS

SEQ ID NO: 811 - protein, 127 aa, Homo sapiens
MAHVQLVESGGGLVQAGGSLRLSCTASGRTFSTYTMAWFRQAPGKEREFVVAISWSGTYYADSVKGRFTISRDNAKNTVYLQMNSLKPEDTAVYYCAAVIGSTVDSYSPSDPLEYDYWGQGTQVTVS

SEQ ID NO: 812 - protein, 127 aa, Homo sapiens
MAHVQLVESGGGLVQAGGSLRLSCTASGRTFSTYTMAWFRQAPGKEREFVVAISWSGAYYAESVKGRFTISRDNAKNTVYLQMNSLKPEDTAVYYCAAVIGSTVDSYSPSDPLEYDYWGQGTQVTVS

SEQ ID NO: 813 - protein, 127 aa, Homo sapiens
MAHVQLVESGGGLVQAGGSLRLSCTASGRTFSTYTMAWFRQAPGKEREFVSAISWSAVYYADAVKGRFTISRDNAKNTLYLQMNSLKPEDTAVYSCGAVIGSTVDSYSPSDPLEYDYWGQGTQVTVS

SEQ ID NO: 814 - protein, 127 aa, Homo sapiens
MAHVQLVESGGGLVQAGGSLRLSCTASGRTFSTYTMAWFRQAPGKEREFVSAISWSAVYYADAVKGRFTISRDNAKNTLYLQMNSLKPEDTAVYSCAAVIGSTVDSYSPSDPLEYDYWGQGTQVTVS

SEQ ID NO: 815 - protein, 127 aa, Homo sapiens
MAHVQLVESGGGLVQAGGSLRLSCTASGRTFSTYTMAWFRQAPGKEREFVSAISWSAVYYADAMKGRFTISRDNAKNTLYLQMNSLKPEDTAVYSCAAVIGSTVDSYSPSDPLEYDYWGQGTQVTVS

SEQ ID NO: 816 - protein, 127 aa, Homo sapiens
MAHVQLVESGGGLVQAGGSLRLSCTASGRTFSTYTMAWFRQAPGKEREFVGAISWSAVYYADSVKGRFTISRDNAKNTLYLQMNSLKPEDTAVYICAAVIGSTVDSYSPSDPLEYDYWGQGTQVTVS

SEQ ID NO: 817 - protein, 127 aa, Homo sapiens
MAHVQLVESGGGLVQAGGSLRLSCTASGRTFSTYTMAWFRQAPGKEREFVASITWSGTYYADSVKGRFTISRDNAKNTMYLQMNSLKPEDTAVYICAAVIGSTVDSYSPSDPLEYDYWGQGTQVTVS

SEQ ID NO: 818 - protein, 127 aa, Homo sapiens
MAHVQLVESGGGLVQAGGSLRLSCTASGRTFSTYTMAWFRQAPGKEREFVASISWSGTYYADSVKGRFTISRDNAKNTVYLQMNSLKPEDTAVYYCAAVIGSTVDSYSPGDPLEYDYWGQGTQVTVS

SEQ ID NO: 819 - protein, 127 aa, Homo sapiens
MAHVQLVESGGGLVQAGGSLRLSCTASGRTFSTYTMAWFRQAPGKEREFVAANSWSGAYYAESVKGRFTISRDNAKNTVYLQMNSLKPEDTAVYYCAAVIGSTVDSYSPSDPLEYDYWGQGTQVTVS

SEQ ID NO: 820 - protein, 127 aa, Homo sapiens
MAHVQLVESGGGLVQAGGSLRLSCTASGRTFSTYTMAWFRQAPGKEREFVAAITWSTTYYTDSVKGRFTISRDNAKNTMYLQMNNLKPEDTAVYICAAVIGSTVDSYSPSDPLEYDYWGQGTQVTVS

SEQ ID NO: 821 - protein, 127 aa, Homo sapiens
MAHVQLVESGGGLVQAGGSLRLSCTASGRTFSTYTMAWFRQAPGKEREFVAAITWSTTYYADSVKGRFTISRDNAKNTMYLQMNNLKPEDTAVYICAAVIGSTVDSYSPSDPLEYDYWGQGTQVTVS

SEQ ID NO: 822 - protein, 127 aa, Homo sapiens
MAHVQLVESGGGLVQAGGSLRLSCTASGRTFSTYTMAWFRQAPGKEREFVAAITWSGTYYADSVKGRFTISRENAKNTMYLQMNSLKPEDTAVYICAAVIGSTVDSYSPSDPLEYDYWGQGTQVTVS

SEQ ID NO: 823 - protein, 127 aa, Homo sapiens
MAHVQLVESGGGLVQAGGSLRLSCTASGRTFSTYTMAWFRQAPGKEREFVAAITWSGTYYADSVKGRFTISRDNAKNTVYLQMNSLKPEDTAVYYCAAVIGSTVDSYSPSDPLEYDYWGQGTQVTVS

SEQ ID NO: 824 - protein, 127 aa, Homo sapiens
MAHVQLVESGGGLVQAGGSLRLSCTASGRTFSTYTMAWFRQAPGKEREFVAAITWSGTYYADSVKGRFTISRDNAKNTMYLQMNSLKPEDTAVYICAAVIGSTVDSYTPSDPLEYDYWGQGTQVTVS

SEQ ID NO: 825 - protein, 127 aa, Homo sapiens
MAHVQLVESGGGLVQAGGSLRLSCTASGRTFSTYTMAWFRQAPGKEREFVAAITWSGTYYADSVKGRFTISRDNAKNTMYLQMNSLKPEDTAVYICAAVIGSTVDSYSPSDPLEYDYWGQGTQVTVS

SEQ ID NO: 826 - protein, 127 aa, Homo sapiens
MAHVQLVESGGGLVQAGGSLRLSCTASGRTFSTYTMAWFRQAPGKEREFVAAITWSGTYYADSVKGQFTISRDNAKNTVYLQMNSLKPEDTAVYYCAAVIGSTVDSYSPSDPLEYDYWGQGTQVTVS

SEQ ID NO: 827 - protein, 127 aa, Homo sapiens
MAHVQLVESGGGLVQAGGSLRLSCTASGRTFSTYTMAWFRQAPGKEREFVAAISWSGVYYAESVKGRFTISRDNAKNTVYLQMNSLKPEDTAVYYCAAVIGSTVDSYSPSDPLEYDYWGQGTQVTVS

SEQ ID NO: 828 - protein, 127 aa, Homo sapiens
MAHVQLVESGGGLVQAGGSLRLSCTASGRTFSTYTMAWFRQAPGKEREFVAAISWSGTYYVDSVKGRFTISRDNAKNTVYLQMNSLKPEDTAVYYCAAVIGSTVDSYSPSDPLEYDYWGQGTQVTVS

SEQ ID NO: 829 - protein, 127 aa, Homo sapiens
MAHVQLVESGGGLVQAGGSLRLSCTASGRTFSTYTMAWFRQAPGKEREFVAAISWSGTYYTDSVKGRFTISRDNAKNTVYLQMNSLKPEDTAVYYCAAVIGSTVDSYSPSDPLEYDYWGQGTQVTVS

SEQ ID NO: 830 - protein, 127 aa, Homo sapiens
MAHVQLVESGGGLVQAGGSLRLSCTASGRTFSTYTMAWFRQAPGKEREFVAAISWSGTYYAESVKGRFTISRDNAKNTVYLQMNSLKPEDTAVYYCAAVIGSTVDSYSPSDPLEYDYWGQGTQVTVS

SEQ ID NO: 831 - protein, 127 aa, Homo sapiens
MAHVQLVESGGGLVQAGGSLRLSCTASGRTFSTYTMAWFRQAPGKEREFVAAISWSGTYYAESVKGRFTISRDNAKNTVYLQMNSLKPEDTAVYYCAAVIGSTVDSYSPGDPLEYDYWGQGTQVTVS

SEQ ID NO: 832 - protein, 127 aa, Homo sapiens
MAHVQLVESGGGLVQAGGSLRLSCTASGRTFSTYTMAWFRQAPGKEREFVAAISWSGTYYADSVKGRFTISRDNTKNTVYLQMNSLKPEDTAVYYCAAVIGSTVDSYSPSDPLEYDYWGQGTQVTVS

SEQ ID NO: 833 - protein, 127 aa, Homo sapiens
MAHVQLVESGGGLVQAGGSLRLSCTASGRTFSTYTMAWFRQAPGKEREFVAAISWSGTYYADSVKGRFTISRDNARNTVYLQMNSLKPEDTAVYYCAAVIGSTVDSYSPSDPLEYDYWGQGTQVTVS

SEQ ID NO: 834 - protein, 127 aa, Homo sapiens
MAHVQLVESGGGLVQAGGSLRLSCTASGRTFSTYTMAWFRQAPGKEREFVAAISWSGTYYADSVKGRFTISRDNAKNTVYLQMNSMKPEDTAVYYCAAVIGSTVDSYSPSDPLEYDYWGQGTQVTVS

SEQ ID NO: 835 - protein, 127 aa, Homo sapiens
MAHVQLVESGGGLVQAGGSLRLSCTASGRTFSTYTMAWFRQAPGKEREFVAAISWSGTYYADSVKGRFTISRDNAKNTVYLQMNSLKPEDTVVYYCAAVIGSTVDSYSPSDPLEYDYWGQGTQVTVS

SEQ ID NO: 836 - protein, 127 aa, Homo sapiens
MAHVQLVESGGGLVQAGGSLRLSCTASGRTFSTYTMAWFRQAPGKEREFVAAISWSGTYYADSVKGRFTISRDNAKNTVYLQMNSLKPEDTTVYYCAAVIGSTVDSYSPSDPLEYDYWGQGTQVTVS

SEQ ID NO: 837 - protein, 127 aa, Homo sapiens
MAHVQLVESGGGLVQAGGSLRLSCTASGRTFSTYTMAWFRQAPGKEREFVAAISWSGTYYADSVKGRFTISRDNAKNTVYLQMNSLKPEDTAVYYCAAVIRSTVDSYSPSDPLEYDYWGQGTQVTVS

SEQ ID NO: 838 - protein, 127 aa, Homo sapiens
MAHVQLVESGGGLVQAGGSLRLSCTASGRTFSTYTMAWFRQAPGKEREFVAAISWSGTYYADSVKGRFTISRDNAKNTVYLQMNSLKPEDTAVYYCAAVIGSTVDSYSPSNPLEYDYWGQGTQVTVS

SEQ ID NO: 839 - protein, 127 aa, Homo sapiens
MAHVQLVESGGGLVQAGGSLRLSCTASGRTFSTYTMAWFRQAPGKEREFVAAISWSGTYYADSVKGRFTISRDNAKNTVYLQMNSLKPEDTAVYYCAAVIGSTVDSYSPSGPLEYDYWGQGTQVTVS

SEQ ID NO: 840 - protein, 127 aa, Homo sapiens
MAHVQLVESGGGLVQAGGSLRLSCTASGRTFSTYTMAWFRQAPGKEREFVAAISWSGTYYADSVKGRFTISRDNAKNTVYLQMNSLKPEDTAVYYCAAVIGSTVDSYSPSDPPEYDYWGQGTQVTVS

SEQ ID NO: 841 - protein, 127 aa, Homo sapiens
MAHVQLVESGGGLVQAGGSLRLSCTASGRTFSTYTMAWFRQAPGKEREFVAAISWSGTYYADSVKGRFTISRDNAKNTVYLQMNSLKPEDTAVYYCAAVIGSTVDSYSPSDPLEYGYWGQGTQVTVS

SEQ ID NO: 842 - protein, 127 aa, Homo sapiens
MAHVQLVESGGGLVQAGGSLRLSCTASGRTFSTYTMAWFRQAPGKEREFVAAISWSGTYYADSVKGRFTISRDNAKNTVYLQMNSLKPEDTAVYYCAAVIGSTVDSYSPSDPLEYDYWSQGTQVTVS

SEQ ID NO: 843 - protein, 127 aa, Homo sapiens
MAHVQLVESGGGLVQAGGSLRLSCTASGRTFSTYTMAWFRQAPGKEREFVAAISWSGTYYADSVKGRFTISRDNAKNTVYLQMNSLKPEDTAVYYCAAVIGSTVDSYSPSDPLEYDYWGQGTQVTVS

SEQ ID NO: 844 - protein, 126 aa, Homo sapiens
MAHVQLVESGGGLVQAGGSLRLSCTASGRTFSTYTMAWFRQAPGKEREFVAAISWSGTYYADSVKGRFTISRDNAKNTVYLQMNSLKPEDTAVYYCAAVIGSTVDSYSPSDPLEYDYWGQGPRSPS

SEQ ID NO: 845 - protein, 127 aa, Homo sapiens
MAHVQLVESGGGLVQAGGSLRLSCTASGRTFSTYTMAWFRQAPGKEREFVAAISWSGTYYADSVKGRFTISRDNAKNTVYLQMNSLKPEDTAVYYCAAVIGSTVDSYSPSDPLEYDYWGHGTQVTVS

SEQ ID NO: 846 - protein, 127 aa, Homo sapiens
MAHVQLVESGGGLVQAGGSLRLSCTASGRTFSTYTMAWFRQAPGKEREFVAAISWSGTYYADSVKGRFTISRDNAKNTVYLQMNSLKPEDTAVYYCAAVIGSTVDSYSPSDHLEYDYWGQGTQVTVS

SEQ ID NO: 847 - protein, 127 aa, Homo sapiens
MAHVQLVESGGGLVQAGGSLRLSCTASGRTFSTYTMAWFRQAPGKEREFVAAISWSGTYYADSVKGRFTISRDNAKNTVYLQMNSLKPEDTAVYYCAAVIGSTVDSYSPGDPLEYDYWGQGTQVTVS

SEQ ID NO: 848 - protein, 127 aa, Homo sapiens
MAHVQLVESGGGLVQAGGSLRLSCTASGRTFSTYTMAWFRQAPGKEREFVAAISWSGTYYADSVKGRFTISRDNAKNTVYLQMNSLKPEDTAVYYCAAVIGSTIDSYSPSDPLEYDYWGQGTQVTVS

SEQ ID NO: 849 - protein, 127 aa, Homo sapiens
MAHVQLVESGGGLVQAGGSLRLSCTASGRTFSTYTMAWFRQAPGKEREFVAAISWSGTYYADSVKGRFTISRDNAKNTVYLQMNSLKPEDTAVYCCAAVIGSTVDSYSPSDPLEYDYWGQGTQVTVS

SEQ ID NO: 850 - protein, 127 aa, Homo sapiens
MAHVQLVESGGGLVQAGGSLRLSCTASGRTFSTYTMAWFRQAPGKEREFVAAISWSGTYYADSVKGRFTISRDNAKNTMYLQMNSLKPEDTAVYYCAAVIGSTVDSYSPSDPLEYDYWGQGTQVTVS

SEQ ID NO: 851 - protein, 127 aa, Homo sapiens
MAHVQLVESGGGLVQAGGSLRLSCTASGRTFSTYTMAWFRQAPGKEREFVAAISWSGTYYADSVKGRFTISRDNAKNPVYLQMNSLKPEDTAVYYCAAVIGSTVDSYSPSDPLEYDYWGQGTQVTVS

SEQ ID NO: 852 - protein, 127 aa, Homo sapiens
MAHVQLVESGGGLVQAGGSLRLSCTASGRTFSTYTMAWFRQAPGKEREFVAAISWSGTYYADSVKGRFIISRDNAKNTVYLQMNSLKPEDTAVYYCAAVIGSTVDSYSPSDPLEYDYWGQGTQVTVS

SEQ ID NO: 853 - protein, 127 aa, Homo sapiens
MAHVQLVESGGGLVQAGGSLRLSCTASGRTFSTYTMAWFRQAPGKEREFVAAISWSGTYYADSVKGRFAISRDNAKNTVYLQMNSLKPEDTAVYYCAAVIGSTVDSYSPSDPLEYDYWGQGTQVTVS

SEQ ID NO: 854 - protein, 127 aa, Homo sapiens
MAHVQLVESGGGLVQAGGSLRLSCTASGRTFSTYTMAWFRQAPGKEREFVAAISWSGTYYADSVKDRFTISRDNAKNTVYLQMNSLKPEDTAVYYCAAVIGSTVDSYSPSDPLEYDYWGQGTQVTVS

SEQ ID NO: 855 - protein, 127 aa, Homo sapiens
MAHVQLVESGGGLVQAGGSLRLSCTASGRTFSTYTMAWFRQAPGKEREFVAAISWSGTYYADSAKGRFTISRDNAKNTVYLQMNSLKPEDTAVYYCAAVIGSTVDSYSPSDPLEYDYWGQGTQVTVS

SEQ ID NO: 856 - protein, 127 aa, Homo sapiens
MAHVQLVESGGGLVQAGGSLRLSCTASGRTFSTYTMAWFRQAPGKEREFVAAISWSGTHYADSVKGRFTISRDNAKNTVYLQMNSLKPEDTAVYYCAAVIGSTVDSYSPSDPLEYDYWGQGTQVTVS

SEQ ID NO: 857 - protein, 127 aa, Homo sapiens
MAHVQLVESGGGLVQAGGSLRLSCTASGRTFSTYTMAWFRQAPGKEREFVAAISWSGAYYVESVKGRFTISRDNAKNTVYLQMNSLKPEDTAVYYCAAVIGSTVDSYSPSDPLEYDYWGQGTQVTVS

SEQ ID NO: 858 - protein, 127 aa, Homo sapiens
MAHVQLVESGGGLVQAGGSLRLSCTASGRTFSTYTMAWFRQAPGKEREFVAAISWSGAYYTESVKGRFTISRDNAKNTVYLQMNSLKPEDTAVYYCAAVIGSTVDSYSPSDPLEYDYWGQGTQVTVS

SEQ ID NO: 859 - protein, 127 aa, Homo sapiens
MAHVQLVESGGGLVQAGGSLRLSCTASGRTFSTYTMAWFRQAPGKEREFVAAISWSGAYYLDSVKGRFTISRDNAKNTVYLQMNSLKPEDTAIYYCAAVIGSTVDSYSPSDPLEYDYWGPGTQVTVS

SEQ ID NO: 860 - protein, 127 aa, Homo sapiens
MAHVQLVESGGGLVQAGGSLRLSCTASGRTFSTYTMAWFRQAPGKEREFVAAISWSGAYYAESVKGRFTISRDNAKNTVYPQMNSLKPEDTAVYYCAAVIGSTVDSYSPSDPLEYDYWGQGTQVTVS

SEQ ID NO: 861 - protein, 127 aa, Homo sapiens
MAHVQLVESGGGLVQAGGSLRLSCTASGRTFSTYTMAWFRQAPGKEREFVAAISWSGAYYAESVKGRFTISRDNAKNTVYLQMNSRKPEDTAVYYCAAVIGSTVDSYSPSDPLEYDYWGQGTQVTVS

SEQ ID NO: 862 - protein, 127 aa, Homo sapiens
MAHVQLVESGGGLVQAGGSLRLSCTASGRTFSTYTMAWFRQAPGKEREFVAAISWSGAYYAESVKGRFTISRDNAKNTVYLQMNSPKPEDTAVYYCAAVIGSTVDSYSPSDPLEYDYWGQGTQVTVS

SEQ ID NO: 863 - protein, 127 aa, Homo sapiens
MAHVQLVESGGGLVQAGGSLRLSCTASGRTFSTYTMAWFRQAPGKEREFVAAISWSGAYYAESVKGRFTISRDNAKNTVYLQMNSMKPEDTAVYYCAAVIGSTVDSYSPSDPLEYDYWGQGTQVTVS

SEQ ID NO: 864 - protein, 127 aa, Homo sapiens
MAHVQLVESGGGLVQAGGSLRLSCTASGRTFSTYTMAWFRQAPGKEREFVAAISWSGAYYAESVKGRFTISRDNAKNTVYLQMNSLKPGDTAVYYCAAVIGSTVDSYSPSDPLEYDYWGQGTQVTVS

SEQ ID NO: 865 - protein, 127 aa, Homo sapiens
MAHVQLVESGGGLVQAGGSLRLSCTASGRTFSTYTMAWFRQAPGKEREFVAAISWSGAYYAESVKGRFTISRDNAKNTVYLQMNSLKPENTAVYYCAAVIGSTVDSYSPSDPLEYDYWGQGTQVTVS

SEQ ID NO: 866 - protein, 127 aa, Homo sapiens
MAHVQLVESGGGLVQAGGSLRLSCTASGRTFSTYTMAWFRQAPGKEREFVAAISWSGAYYAESVKGRFTISRDNAKNTVYLQMNSLKPEDTVVYYCAAVIGSTVDSYSPSDPLEYDYWGQGTQVTVS

SEQ ID NO: 867 - protein, 127 aa, Homo sapiens
MAHVQLVESGGGLVQAGGSLRLSCTASGRTFSTYTMAWFRQAPGKEREFVAAISWSGAYYAESVKGRFTISRDNAKNTVYLQMNSLKPEDTTVYYCAAVIGSTVDSYSPSDPLEYDYWGQGTQVTVS

SEQ ID NO: 868 - protein, 127 aa, Homo sapiens
MAHVQLVESGGGLVQAGGSLRLSCTASGRTFSTYTMAWFRQAPGKEREFVAAISWSGAYYAESVKGRFTISRDNAKNTVYLQMNSLKPEDTAVYYCAAVIWSTVDSYSPSDPLEYDYWGQGTQVTVS

SEQ ID NO: 869 - protein, 127 aa, Homo sapiens
MAHVQLVESGGGLVQAGGSLRLSCTASGRTFSTYTMAWFRQAPGKEREFVAAISWSGAYYAESVKGRFTISRDNAKNTVYLQMNSLKPEDTAVYYCAAVIVSTVDSYSPSDPLEYDYWGQGTQVTVS

SEQ ID NO: 870 - protein, 127 aa, Homo sapiens
MAHVQLVESGGGLVQAGGSLRLSCTASGRTFSTYTMAWFRQAPGKEREFVAAISWSGAYYAESVKGRFTISRDNAKNTVYLQMNSLKPEDTAVYYCAAVIGSTVDSYSTSDPLEYDYWGQGTQVTVS

SEQ ID NO: 871 - protein, 127 aa, Homo sapiens
MAHVQLVESGGGLVQAGGSLRLSCTASGRTFSTYTMAWFRQAPGKEREFVAAISWSGAYYAESVKGRFTISRDNAKNTVYLQMNSLKPEDTAVYYCAAVIGSTVDSYSPSDPREYDYWGQGTQVTVS

SEQ ID NO: 872 - protein, 126 aa, Homo sapiens
MAHVQLVESGGGLVQAGGSLRLSCTASGRTFSTYTMAWFRQAPGKEREFVAAISWSGAYYAESVKGRFTISRDNAKNTVYLQMNSLKPEDTAVYYCAAVIGSTVDSYSPSDPLSTTTGARGPRSPS

SEQ ID NO: 873 - protein, 127 aa, Homo sapiens
MAHVQLVESGGGLVQAGGSLRLSCTASGRTFSTYTMAWFRQAPGKEREFVAAISWSGAYYAESVKGRFTISRDNAKNTVYLQMNSLKPEDTAVYYCAAVIGSTVDSYSPSDPLEYDYWGQGTQVTVS

SEQ ID NO: 874 - protein, 127 aa, Homo sapiens
MAHVQLVESGGGLVQAGGSLRLSCTASGRTFSTYTMAWFRQAPGKEREFVAAISWSGAYYAESVKGRFTISRDNAKNTVYLQMNSLKPEDTAVYYCAAVIGSTVDSYSPSDPLEYDYWGHGTQVTVS

SEQ ID NO: 875 - protein, 127 aa, Homo sapiens
MAHVQLVESGGGLVQAGGSLRLSCTASGRTFSTYTMAWFRQAPGKEREFVAAISWSGAYYAESVKGRFTISRDNAKNTVYLQMNSLKPEDTAVYYCAAVIGSTVDSYSPSDPLEYDYGGQGTQVTVS

SEQ ID NO: 876 - protein, 127 aa, Homo sapiens
MAHVQLVESGGGLVQAGGSLRLSCTASGRTFSTYTMAWFRQAPGKEREFVAAISWSGAYYAESVKGRFTISRDNAKNTVYLQMNSLKPEDTAVYYCAAVIGSTVDSYSPSDPLEYDDWGQGTQVTVS

SEQ ID NO: 877 - protein, 127 aa, Homo sapiens
MAHVQLVESGGGLVQAGGSLRLSCTASGRTFSTYTMAWFRQAPGKEREFVAAISWSGAYYAESVKGRFTISRDNAKNTVYLQMNSLKPEDTAVYYCAAVIGSTVDSYSPSDPLECDYWGQGTQVTVS

SEQ ID NO: 878 - protein, 127 aa, Homo sapiens
MAHVQLVESGGGLVQAGGSLRLSCTASGRTFSTYTMAWFRQAPGKEREFVAAISWSGAYYAESVKGRFTISRDNAKNTVYLQMNSLKPEDTAVYYCAAVIGSTVDSYSPSDHLEYDYWGQGTQVTVS

SEQ ID NO: 879 - protein, 127 aa, Homo sapiens
MAHVQLVESGGGLVQAGGSLRLSCTASGRTFSTYTMAWFRQAPGKEREFVAAISWSGAYYAESVKGRFTISRDNAKNTVYLQMNSLKPEDTAVYYCAAVIGSTVDSYGPSDPLEYDYWGQGTQVTVS

SEQ ID NO: 880 - protein, 127 aa, Homo sapiens
MAHVQLVESGGGLVQAGGSLRLSCTASGRTFSTYTMAWFRQAPGKEREFVAAISWSGAYYAESVKGRFTISRDNAKNTVYLQMNSLKPEDTAVYYCAAVIGSTIDSYSPSDPLEYDYWGQGTQVTVS

SEQ ID NO: 881 - protein, 127 aa, Homo sapiens
MAHVQLVESGGGLVQAGGSLRLSCTASGRTFSTYTMAWFRQAPGKEREFVAAISWSGAYYAESVKGRFTISRDNAKNTVYLQMNSLKPEDTAVYYCAAVIGSTFDSYSPSDPLEYDYWGQGTQVTVS

SEQ ID NO: 882 - protein, 127 aa, Homo sapiens
MAHVQLVESGGGLVQAGGSLRLSCTASGRTFSTYTMAWFRQAPGKEREFVAAISWSGAYYAESVKGRFTISRDNAKNTVYLQMNSLKPEDTAVYYCAAVIGSIVDSYSPSDPLEYDYWGQGTQVTVS

SEQ ID NO: 883 - protein, 127 aa, Homo sapiens
MAHVQLVESGGGLVQAGGSLRLSCTASGRTFSTYTMAWFRQAPGKEREFVAAISWSGAYYAESVKGRFTISRDNAKNTVYLQMNSLKPEDTAVYYCAAVIGSAVDSYSPSDPLEYDYWGQGTQVTVS

SEQ ID NO: 884 - protein, 127 aa, Homo sapiens
MAHVQLVESGGGLVQAGGSLRLSCTASGRTFSTYTMAWFRQAPGKEREFVAAISWSGAYYAESVKGRFTISRDNAKNTVYLQMNSLKPEDTAVYYCAAVIGATVDSYSPSDPLEYDYWGQGTQVTVS

SEQ ID NO: 885 - protein, 127 aa, Homo sapiens
MAHVQLVESGGGLVQAGGSLRLSCTASGRTFSTYTMAWFRQAPGKEREFVAAISWSGAYYAESVKGRFTISRDNAKNTVYLQMNSLKPEDTAVYCCAAVIGSTVDSYSPSDPLEYDYWGQGTQVTVS

SEQ ID NO: 886 - protein, 127 aa, Homo sapiens
MAHVQLVESGGGLVQAGGSLRLSCTASGRTFSTYTMAWFRQAPGKEREFVAAISWSGAYYAESVKGRFTISRDNAKNTMYLQMNSLKPEDTAVYYCAAVIGSTVDSYSPSDPLEYDYWGQGTQVTVS

SEQ ID NO: 887 - protein, 127 aa, Homo sapiens
MAHVQLVESGGGLVQAGGSLRLSCTASGRTFSTYTMAWFRQAPGKEREFVAAISWSGAYYAESVKGRFTISRDNAKNMVYLQMNSLKPEDTAVYYCAAVIGSTVDSYSPSDPLEYDYWGQGTQVTVS

SEQ ID NO: 888 - protein, 127 aa, Homo sapiens
MAHVQLVESGGGLVQAGGSLRLSCTASGRTFSTYTMAWFRQAPGKEREFVAAISWSGAYYAESVKGRFTISGDNAKNTVYLQMNSLKPEDTAVYYCAAVIGSTVDSYSPSDPLEYDYWGQGTQVTVS

SEQ ID NO: 889 - protein, 127 aa, Homo sapiens
MAHVQLVESGGGLVQAGGSLRLSCTASGRTFSTYTMAWFRQAPGKEREFVAAISWSGAYYAESVKGQFTISRDNAKNTVYLQMNSLKPEDTAVYYCAAVIGSTVDSYSPSDPLEYDYWGQGTQVTVS

SEQ ID NO: 890 - protein, 127 aa, Homo sapiens
MAHVQLVESGGGLVQAGGSLRLSCTASGRTFSTYTMAWFRQAPGKEREFVAAISWSGAYYADSVTGRFTISRDNAKNTVYLQMNSLKPEDTAVYYCAAVIGSTVDSYRPGDPLEYDYWGQGTQVTVS

SEQ ID NO: 891 - protein, 127 aa, Homo sapiens
MAHVQLVESGGGLVQAGGSLRLSCTASGRTFSTYTMAWFRQAPGKEREFVAAISWSDAYYAESVKGRFTISRDNAKNTVYLQMNSLKPEDTAVYYCAAVIGSTVDSYSPSDPLEYDYWGQGTQVTVS

SEQ ID NO: 892 - protein, 127 aa, Homo sapiens
MAHVQLVESGGGLVQAGGSLRLSCTASGRTFSTYTMAWFRQAPGKEREFVAAIAWSGAYYADSVKGRFTISRDNAKNTVYLQMNSLKPEDTAVYICAAAIGSTVDSYSPSDPLEYDYWGQGTQVTVS

SEQ ID NO: 893 - protein, 127 aa, Homo sapiens
MAHVQLVESGGGLVQAGGSLRLSCTASGRTFSTYTMAWFRQAPGKERDFVAAISWTGVYYADSVKGRFTISRDNAKNTVYLQMNSLKPEDTAVYYCAAVIGSTVDSYSPSDPLEYDYWGQGTQVTVS

SEQ ID NO: 894 - protein, 127 aa, Homo sapiens
MAHVQLVESGGGLVQAGGSLRLSCTASGRTFSTYTMAWFRQAPGKERDFVAAISWSGVYYADSVKGRFTISRDNAKNTVYLQMNSLKPEDTAVYYCAAVIGSTVDSYSPSDPLEYDYWGQGTQVTVS

SEQ ID NO: 895 - protein, 127 aa, Homo sapiens
MAHVQLVESGGGLVQAGGSLRLSCTASGRTFSTYTMAWFRQAPGKERDFVAAISWSGVYYADSVKGRFTISRDNAKNTVFLQMNSLKPEDTAVYYCAAVIGSTVDSYSPSDPLEYDYWGQGTQVTVS

SEQ ID NO: 896 - protein, 127 aa, Homo sapiens
MAHVQLVESGGGLVQAGGSLRLSCTASGRTFSTYTMAWFRQAPGKERDFVAAISWSGTYYADSVKGRYTISRDNAKNTVYLQMNSLKPEDTAVYYCAAVIGSTVDSYSPSDPLEYDYWGQGTQVTVS

SEQ ID NO: 897 - protein, 127 aa, Homo sapiens
MAHVQLVESGGGLVQAGGSLRLSCTASGRTFSTYTMAWFRQAPGKERDFVAAISWSGTYYADSVKGRYTISRDNAKNTVHLQMNSLKPEDTAVYYCTAVIGSTVDSYSPSDPLEYDYWGQGTQVTVS

SEQ ID NO: 898 - protein, 127 aa, Homo sapiens
MAHVQLVESGGGLVQAGGSLRLSCTASGRTFSTYTMAWFRQAPGKERDFVAAISWSGAYYTDSVKGRFTISRDNAKNTVYLQMNSLKPEDTAVYYCAAVIGSTVDSYSPSDPLDYDYWGQGTQVTVS

SEQ ID NO: 899 - protein, 127 aa, Homo sapiens
MAHVQLVESGGGLVQAGGSLRLSCTASGRTFSTYTMAWFRQAPGKERDFVAAISWSGAYYADSVKGRFTISRDNAKNTVYLQMNSLKPEDTAVYYCAAVIGSTVDSYSPSDPLEYDYWGQGTQVTVS

SEQ ID NO: 900 - protein, 127 aa, Homo sapiens
MAHVQLVESGGGLVQAGGSLRLSCTASGRTFSTYTMAWFRQAPGKERDFVAAISWSGAYYADSVKGRFTISRDNAKNTVYLQMNSLKPEDTAVYYCAAVIGSTVDSYSPSDPLDYDYWGQGTQVTVS

SEQ ID NO: 901 - protein, 127 aa, Homo sapiens
MAHVQLVESGGGLVQAGGSLRLSCTASGRTFSTYTMAWFRQAPGKERDFVAAISWSGAYYADSAKGRFTISRDNAKNTVYLQMNSLKPEDTAVYVCAAVIGSTVDSYSPSDPLEYDYWGQGTQVTVS

SEQ ID NO: 902 - protein, 127 aa, Homo sapiens
MAHVQLVESGGGLVQAGGSLRLSCTASGRTFSTYTMAWFRQAPGKERDFVAAIDWSGVYYADSVKGRFTISRDNAKNTLYLQMNSLKPEDTAVYYCAAVIGSTVDSYSPSDPLEYDYWGQGTQVTVS

SEQ ID NO: 903 - protein, 127 aa, Homo sapiens
MAHVQLVESGGGLVQAGGSLRLSCTASGRTFSTYTMAWFRQAPGKEHEFVAAITWSGTYYADSVKGRFTISRDNAKNTMYLQMNSLKPEDTAVYICAAVIGSTVDSYSPSDPLEYDYWGQGTQVTVS

SEQ ID NO: 904 - protein, 127 aa, Homo sapiens
MAHVQLVESGGGLVQAGGSLRLSCTASGRTFSTYTMAWFRQAPGKEHEFVAAISWSGTYYADSVKGRFTISRDNAKNTVYLQMNSLKPEDTAVYYCAAVIGSTVDSYSPSDPLEYDYWGQGTQVTVS

SEQ ID NO: 905 - protein, 127 aa, Homo sapiens
MAHVQLVESGGGLVQAGGSLRLSCTASGRTFSTYTMAWFRQAPGKEHEFVAAISWSGAYYAESVKGRFTISRDNAKNTVYLQMNSLKPEDTAVYYCAAVIGSTVDSYSPSDPLEYDYWGQGTQVTVS

SEQ ID NO: 906 - protein, 127 aa, Homo sapiens
MAHVQLVESGGGLVQAGGSLRLSCTASGRTFSTYTMAWFRQAPGKECEFVAAISWSGTYYADSVKGRFTISRDNAKNTVYLQMNSLKPEDTAVYYCAAVIGSTVDSYSPSDPLEYDYWGQGTQVTVS

SEQ ID NO: 907 - protein, 127 aa, Homo sapiens
MAHVQLVESGGGLVQAGGSLRLSCTASGRTFSTYTMAWFRQAPGKECEFVAAISWSGAYYAESVKGRFTISRDNAKNTVYLQMNSLKPEDTAVYYCAAVIGSTVDSYSPSDPLEYDYWGQGTQVTVS

SEQ ID NO: 908 - protein, 127 aa, Homo sapiens
MAHVQLVESGGGLVQAGGSLRLSCTASGRTFSTYTMAWFHQAPGKEREFVAAISWSGAYYAESVKGRFTISRDNAKNTVYLQMNSLKPEDTAVYYCAAVIGSTVDSYSPSDPLEYDYWGQGTQVTVS

SEQ ID NO: 909 - protein, 127 aa, Homo sapiens
MAHVQLVESGGGLVQAGGSLRLSCTASGRTFSTYTMARFRQAPGKEREFVAAISWSGAYYAESVKGRFTISRDNAKNTVYLQMNSLKPEDTAVYYCAAVIGSTVDSYSPSDPLEYDYWGQGTQVTVS

SEQ ID NO: 910 - protein, 127 aa, Homo sapiens
MAHVQLVESGGGLVQAGGSLRLSCTASGRTFSTYTMALFRQAPGKEREFVAAISWSGAYYAESVKGRFTISRDNAKNTVYLQMNSLKPEDTAVYYCAAVIGSTVDSYSPSDPLEYDYWGQGTQVTVS

SEQ ID NO: 911 - protein, 127 aa, Homo sapiens
MAHVQLVESGGGLVQAGGSLRLSCTASGRTFSTYSMAWFRQAPGKEREFVAAISWSGAYYLDSVKGRFTISRDNAKNTVYLQMNSLKAEDTAVYYCAAVIGSTVDSYSPSDPLEYDYWGQGTQVTVS

SEQ ID NO: 912 - protein, 127 aa, Homo sapiens
MAHVQLVESGGGLVQAGGSLRLSCTASGRTFSTYAMAWFRQAPGKEREFVAAISWTGAYYLDSVKGRFTISRDNAKNTMYLQMNSLKPEDTAVYYCAAVIGSTVDSYSPSDPLEYDYWGQGTQVTVS

SEQ ID NO: 913 - protein, 127 aa, Homo sapiens
MAHVQLVESGGGLVQAGGSLRLSCTASGRTFSTYAMAWFRQAPGKEREFVAAISWSGVDYSESVKGRFTISRDNAKNTVYLQMNSLKPEDTAVYYCAAVIGSTVDSYSPSDPLEYDYWGQGTQVTVS

SEQ ID NO: 914 - protein, 127 aa, Homo sapiens
MAHVQLVESGGGLVQAGGSLRLSCTASGRTFSTYAMAWFRQAPGKEREFVAAISWSGAYYLDSVKGRFTISRDNAKNTVYLQMNSLKPEDTAVYYCAAVIGSTVDSYSPSDPLEYDYWGQGTQVTVS

SEQ ID NO: 915 - protein, 127 aa, Homo sapiens
MAHVQLVESGGGLVQAGGSLRLSCTASGRTFSTYAMAWFRQAPGKEREFVAAISWSGAYYLDSVKGRFTISRDNAKNTLYLQMNSLKPEDTAVYYCAAVIGSTVDSYNPSDPLEYDYWGQGTQVTVS

SEQ ID NO: 916 - protein, 127 aa, Homo sapiens
MAHVQLVESGGGLVQAGGSLRLSCTASGRTFRTYTMAWFRQAPGKEREFVAAISWSGAYYAESVKGRFTISRDNAKNTVYLQMNSLKPEDTAVYYCAAVIGSTVDSYSPSDPLEYDYWGQGTQVTVS

SEQ ID NO: 917 - protein, 127 aa, Homo sapiens
MAHVQLVESGGGLVQAGGSLRLSCTASGRTFNTYTMAWFRQAPGKEREFVAAISWSGTYYADSVKGRFTISRDNAKNTVYLQMNSLKPEDTAVYYCAAVIGSTVDSYSPSDPLEYDYWGQGTQVTVS

SEQ ID NO: 918 - protein, 122 aa, Homo sapiens
MAHVQLVESGGGLVQAGGSLRLSCQASGRTFDSGPMAWFRQAPGKEREFVAAIRRSPERIYYADSVKGRFTISRDNAKNTVYLQMNNLKPEDTAVYYCAAALSRSTSVDYDYWGQGTQVTVS

SEQ ID NO: 919 - protein, 127 aa, Homo sapiens
MAHVQLVESGGGLVQAGGSLRLSCIASGRTFSTYTMAWFRQAPGKEREFVAAISWSGAYYAESVKGRFTISRDNAKNTVYLQMNSLKPEDTAVYYCAAVIGSTVDSYSPSDPLEYDYWGQGTQVTVS

SEQ ID NO: 920 - protein, 126 aa, Homo sapiens
MAHVQLVESGGGLVQAGGSLRLSCAVSGVSFRNMGWFRQAPGKEREFVAAISWSGDSTVYVDSVKGRVTISRDNAKNTVYLEMNSLKPEDTAVYYCAADGRFRAGQIGPSLGLYHYWGQGTQVTVS

SEQ ID NO: 921 - protein, 126 aa, Homo sapiens
MAHVQLVESGGGLVQAGGSLRLSCAVSGVSFRNMGWFRQAPGKEREFVAAISWSGDSTVYADSVKGRVTISRDNAKNTVYLEMNTLKPEDTAVYYCAADGRFRAGQIGPSLGLYHYWGQGTQVTVS

SEQ ID NO: 922 - protein, 126 aa, Homo sapiens
MAHVQLVESGGGLVQAGGSLRLSCAVSGVSFRNMGWFRQAPGKEREFVAAISWSGDSTVYADSVKGRVTISRDNAKNTVYLEMNSLKPEDTAVYYCAADGRFRAGQIGPSLGLYHYWGQGTQVTVS

SEQ ID NO: 923 - protein, 126 aa, Homo sapiens
MAHVQLVESGGGLVQAGGSLRLSCAVSGVSFRNMGWFRQAPGKEREFVAAISWSGDSTIYADAVKGRVTISRDNAKNTVYLEMNSLKPEDTAVYYCAADGRFRAGEIGTSLGLYRYWGQGTQVTVS

SEQ ID NO: 924 - protein, 126 aa, Homo sapiens
MAHVQLVESGGGLVQAGGSLRLSCAVSGVSFRNMGWFRQAPGKEREFVAAISWGGDSTIYGDSVKGRVTISRDNAKNTAYLEMNSLKPEDTAVYYCAADGRFRAGRISSDLGLYHYWGQGTQVTVS

SEQ ID NO: 925 - protein, 126 aa, Homo sapiens
MAHVQLVESGGGLVQAGGSLRLSCAGSGRSFSSYDMGWFRRAPGKEREFVAAITGSRGSTYYADSVKGRFTISRDNAKNTVYLQMNSLKPEDTAVYYCAAGFGSVDGLEYSGSYDDWGQGTQVTVS

SEQ ID NO: 926 - protein, 126 aa, Homo sapiens
MAHVQLVESGGGLVQAGGSLRLSCAGSGRSFSSYDMGWFRRAPGKEREFVAAISGSRGSTYYADSVKGRFTISRDNAKNTVYLQMNSLKPEDTAVYYCAAGFGSVDGLEYSGSYDDWGQGTQVTVS

SEQ ID NO: 927 - protein, 131 aa, Homo sapiens
MAHVQLVESGGGLVQAGGSLRLSCADAASGRTFSTYTMGWFRQAPGKEREFVAHINWDGSNTYYADSVKGRFTISRDNAKNTMYLQMNSLKPEDTAVYYCAAAIGSTVDSYRHSDPLEYDYWGQGTQVTVS

SEQ ID NO: 928 - protein, 116 aa, Homo sapiens
MAHVQLVESGGGLVQAGGSLRLSCAASVSAFSSVPFAWYRQAPGKQRESVARIWLSDTGTYSDSVRGRFTISRDNAKQTLFLEMNSLKPEDTAVYYCNSWPNQNYAWGQGTQVTVS

SEQ ID NO: 929 - protein, 130 aa, Homo sapiens
MAHVQLVESGGGLVQAGGSLRLSCAASGSPFSSLDMGWFRQRPGKERDVVATINWTGDSTYYLDSVKGRFTISRDNAKNTVFLQMNSLKPEDTAVYYCAARGGGSSVDSEYDVGEFEYDYWGQGTQVTVS

SEQ ID NO: 930 - protein, 124 aa, Homo sapiens
MAHVQLVESGGGLVQAGGSLRLSCAASGSIGSINIMGWYRQAPGKQRELVASITTGGATNYADSVKGRFTISRDNAKNTVYLQMNSLKPEDTAVYYCNLDRGTHLGDSFERDDYWGRGTQVTVS

SEQ ID NO: 931 - protein, 124 aa, Homo sapiens
MAHVQLVESGGGLVQAGGSLRLSCAASGSIGSINIMGWYRQAPGKQRELVASITSGGATNYADSVKGRFTISRDNAKNTVYLQMNSLKPEDTAVYYCNLDRGTHLGDSFERDDYWGRGTQVTVS

SEQ ID NO: 932 - protein, 124 aa, Homo sapiens
MAHVQLVESGGGLVQAGGSLRLSCAASGSIGSINIMGWYRQAPGKQRELVASITSGGATNYADSVKGRFTISRDNAKNTMYLQMNSLKPEDTAVYYCNLDRGTHLGDSFERDDYWGRGTQVTVS

SEQ ID NO: 933 - protein, 124 aa, Homo sapiens
MAHVQLVESGGGLVQAGGSLRLSCAASGSIGSINIMGWYRQAPGKQRELVASITSGGATNYADSVKGRFTISRDNAKNAVYLQMNSLKPEDTAVYYCNLDRGTHLGDSFERDDYWGRGTQVTVS

SEQ ID NO: 934 - protein, 129 aa, Homo sapiens
MAHVQLVESGGGLVQAGGSLRLSCAASGRTFTHLNMGWFRQAPGKEREFTAHINWSGGSTNYADSVKGRFTISRDNAKNTVYLQMNSLKPEDTAVYYCAATLGDSVDLDSDADPRGYDYWGQGTQVTVS

SEQ ID NO: 935 - protein, 128 aa, Homo sapiens
MAHVQLVESGGGLVQAGGSLRLSCAASGRTFSTYVMAWFRQAPGKEREFVAAISWNGSTYYADSVKGRFTISRDNAKNTVYLQMNSLSPEDTAVYYCAAAIGSTVDSYSPSDPLEYDYWGQGTQVTVS

SEQ ID NO: 936 - protein, 129 aa, Homo sapiens
MAHVQLVESGGGLVQAGGSLRLSCAASGRTFSTYTMGWFRQAPGKEREFVAHISWSGSTTYYADSVKGRFTISRDNAKNTMYLQMNSLKPEDTSVYYCAVAIGSPVDSYRHSDPLEYDYWGQGTQVTVS

SEQ ID NO: 937 - protein, 128 aa, Homo sapiens
MAHVQLVESGGGLVQAGGSLRLSCAASGRTFSTYTMGWFRQAPGKEREFVAAVTWSETLYSDSVKGRFTISRDNAKNTVYLQMNSLKPEDTAVYYCAAVQGSPVDTIVVLTTSEEYDYWGQGTQVTVS

SEQ ID NO: 938 - protein, 127 aa, Homo sapiens
MAHVQLVESGGGLVQAGGSLRLSCAASGRTFSTYTMAWFRQAPGKEREFVAAISWSGTYYADSVKGRFTISRDNAKNTVYLQMNSLKPEDTAVYYCAAVIGSTVDSYSPSDPLEYDYWGQGTQVTVS

SEQ ID NO: 939 - protein, 127 aa, Homo sapiens
MAHVQLVESGGGLVQAGGSLRLSCAASGRTFSTYTMAWFRQAPGKEREFVAAISWSGAYYAESVKGRFTISRDNAKNTVYLQMNSLKPEDTAVYYCAAVIGSTVDSYSPSDPLEYDYWGQGTQVTVS

SEQ ID NO: 940 - protein, 129 aa, Homo sapiens
MAHVQLVESGGGLVQAGGSLRLSCAASGRTFSTYTMAWFRQAPGKEREFVAAISWNGGSTYYADSVKGRFTIFRDNAKNMVYLQMNNLKPEDTAVYYCAAAIGSTVDSYDPGDPLEYDYWGQGTQVTVS

SEQ ID NO: 941 - protein, 127 aa, Homo sapiens
MAHVQLVESGGGLVQAGGSLRLSCAASGRTFSTYTLGWFRQAPGKEREFVGTITWSGSSTADSVKGRFTISRDNAKNTVYLQMNSLKPEDTAVYYCAAAIGSSVDSDYPSDPLEYDYWGQGTQVTVS

SEQ ID NO: 942 - protein, 127 aa, Homo sapiens
MAHVQLVESGGGLVQAGGSLRLSCAASGRTFSTYTLGWFRQAPGKEREFVGAITWSGSSTADSVKGRFTISRDNAKNTVYLQMNSLKPEDTAVYYCAAAIGSSVDSYYPSDPLEYDYWGQGTQVTVS

SEQ ID NO: 943 - protein, 127 aa, Homo sapiens
MAHVQLVESGGGLVQAGGSLRLSCAASGRTFSTYTLGWFRQAPGKEREFVGAITWSGGTTADSVKGRFSISRDNAKNTVYLQMNSLKPEDTAVYYCAAVIGSTVDSYDPSDPIEYDYWGQGTQVTVS

SEQ ID NO: 944 - protein, 128 aa, Homo sapiens
MAHVQLVESGGGLVQAGGSLRLSCAASGRTFSTYTLGWFRQAPGKEREFVAAITWSSGTYYADSVKGRFTISRDNAKNTVYLQMNSLKPEDTAVYYCAAVIGSTVDTYNPGDPLEYDYWGQGTQVTVS

SEQ ID NO: 945 - protein, 128 aa, Homo sapiens
MAHVQLVESGGGLVQAGGSLRLSCAASGRTFSTYTLGWFRQAPGKEREFVAAITWSAGTYYADSMKGRFTISRDNAKNTVYLQMNSLKPEDTAVYYCAAVIGSTVDTYNPGDPLEYDYWGQGTQVTVS

SEQ ID NO: 946 - protein, 128 aa, Homo sapiens
MAHVQLVESGGGLVQAGGSLRLSCAASGRTFSTYTLGWFRQAPGKEREFVAAINWSSGTYYADSVKGRFTISRDNAKNTVYLQMNSLKPEDTAVYYCAAVIGSTVDTYNPGDPLEYDYWGQGTQVTVS

SEQ ID NO: 947 - protein, 129 aa, Homo sapiens
MAHVQLVESGGGLVQAGGSLRLSCAASGRTFSTYTLGWFRQAPGKEREFVAAINWSGGTTYYADSVKGRFTISRNNAKNTVYLQMNSLKPEDTAVYYCAAVIGSTVDSYDPGDPLEYDYWGQGTQVTVS

SEQ ID NO: 948 - protein, 127 aa, Homo sapiens
MAHVQLVESGGGLVQAGGSLRLSCAASGRTFSTYTLAWFRQAPGKEREFVGAITWSGASTADSVKGRFTISRDNAKNTVYLQMNSLKPEDTAVYYCAAAIGSTVDSYHPSDPLDYDYWGQGTQVTVS

SEQ ID NO: 949 - protein, 127 aa, Homo sapiens
MAHVQLVESGGGLVQAGGSLRLSCAASGRTFSTYSLGWFRQAPGKEREFVGAISWSGSTTADSVKGRFTISRDNAKNTVYLQMNNLKPEDTAVYYCAAAIGSTVDSYNPSDPLEYDYWGQGTQVTVS

SEQ ID NO: 950 - protein, 129 aa, Homo sapiens
MAHVQLVESGGGLVQAGGSLRLSCAASGRTFSTYEMAWFRQAPGKEREFVAAINWSGSSTYYADSVKGRFTISRDNAKNTVYLQMNSLKPEDTAVYVCAAVIGSTVDEYRPSDPLEYDYWGQGTQVTVS

SEQ ID NO: 951 - protein, 129 aa, Homo sapiens
MAHVQLVESGGGLVQAGGSLRLSCAASGRTFSSYTMGWFRQAPGLERDFVAEISWNGGSTGYADSVKGRFTISRDNAKNTVYLQMNSLKPQDTAVYYCAAVIGSPTDSSDYRSSLDYDYWGQGTQVTVS

SEQ ID NO: 952 - protein, 129 aa, Homo sapiens
MAHVQLVESGGGLVQAGGSLRLSCAASGRTFSSYTMGWFHQAPGKEREFVAEISGTGGNTGYSDSVKGRFTISRDNAKNTVYLQMNSLKLEDTAVYYCAAVLGSPTDSSDYRSTLDYDYWGQGTQVTVS

SEQ ID NO: 953 - protein, 129 aa, Homo sapiens
MAHVQLVESGGGLVQAGGSLRLSCAASGRTFSSYTMGWFHQAPGKEREFVAEISGTGGNTGYADSVKGRFTISRDNAKNTVYLQMNTLKPEDTAVYYCAAVIGSPTDSSDYRSSLDYDYWGQGTQVTVS

SEQ ID NO: 954 - protein, 129 aa, Homo sapiens
MAHVQLVESGGGLVQAGGSLRLSCAASGRTFSSYTMGWFHQAPGKEREFVAEISGTGGNTGYADSVKGRFTISRDNAKNTVYLQMNSLKPEDTAAYYCAAVIGSPTDSSDYRSSLDYDYWGQGTQVTVS

SEQ ID NO: 955 - protein, 129 aa, Homo sapiens
MAHVQLVESGGGLVQAGGSLRLSCAASGRTFSSYTMGWFHQAPGKEREFVAEIGGTGGNTGYADSVKGRFTISRDNAKNTVYLQMNILKPEDTAVYYCAAVIGSPTDSSDYRSSLDYDYWGQGTQVTVS

SEQ ID NO: 956 - protein, 129 aa, Homo sapiens
MAHVQLVESGGGLVQAGGSLRLSCAASGRTFSSYTMGWFHQAPGKERDFVAEISGTGGNIGYADSVKGRFTISRDNAKNTVYLQMNSLKPEDTAIYYCAAVIGSPTDSSDYRSSLDYDYWGQGTQVTVS

SEQ ID NO: 957 - protein, 130 aa, Homo sapiens
MAHVQLVESGGGLVQAGGSLRLSCAASGRTFSSLDMGWFRQRPGKERDVVATINWTGDSTYYLDSVKGRFTISRDNAKNTVFLQMNSLKPEDTAVYYCAARGGGSSVDSEYDVGEFEYDYWGQGTQVTVS

SEQ ID NO: 958 - protein, 129 aa, Homo sapiens
MAHVQLVESGGGLVQAGGSLRLSCAASGRTFSRYTMGWFRQAPGKEREFVAAINWSGISTYYADSVKGRFTISRDNAKNTVYLQMNNLKPEDTAVYYCAAYRDYSGSTVDPPNQSEYDYWGQGTQVTVS

SEQ ID NO: 959 - protein, 129 aa, Homo sapiens
MAHVQLVESGGGLVQAGGSLRLSCAASGRTFSRYTMGWFHQAPGKEREFVAEISGTGGNTGYADSVKGRFTMSRDNAKNTVYLQMNSLKPEDTGVYYCAAVIGSPTDSSDYRSSLDYDYWGQGTQVTVS

SEQ ID NO: 960 - protein, 119 aa, Homo sapiens
MAHVQLVESGGGLVQAGGSLRLSCAASGRTFSRVGWFHQPAPEKRREVVAAISWRSGDTYYTHFVEGRFTISRDNAKNTVYLQMNSLTPEDTAVYYCAASDKSTGPYEYWGQGTQVTVS

SEQ ID NO: 961 - protein, 126 aa, Homo sapiens
MAHVQLVESGGGLVQAGGSLRLSCAASGRTFSDYTMGWFRRAPGKEREFVATISTGGGSTKYADSVKGRFTISRDNTKNMVYLQMNSLKPEDTAVYYCAASLRGYYSGSYSREYDYWGQGTQVTVS

SEQ ID NO: 962 - protein, 126 aa, Homo sapiens
MAHVQLVESGGGLVQAGGSLRLSCAASGRTFSDYTMGWFRRAPGKEREFVATISTGGGSTKYADSVKGRFTISRDNAKNMVYLQMNSLKPEDTAVYYCAASHRGYYSGSYSREYDNWGQGTQVTVS

SEQ ID NO: 963 - protein, 126 aa, Homo sapiens
MAHVQLVESGGGLVQAGGSLRLSCAASGRTFSDYTMGWFRRAPGKEREFVATISTGGGSTKYADSVKGRFTISRDNAKNMVYLQMNSLKPEDTAVYYCAASHRGYYSGSYSREYDDWGQGTQVTVS

SEQ ID NO: 964 - protein, 126 aa, Homo sapiens
MAHVQLVESGGGLVQAGGSLRLSCAASGRTFSDWTMGWFRRAPGKEREFVATISTGGGSTKYADSVKGRFTISRDNAKNMVYLQMNSLKPEDTAVYYCAASHRGYYSGSYSREYDNWGQGTQVTVS

SEQ ID NO: 965 - protein, 129 aa, Homo sapiens
MAHVQLVESGGGLVQAGGSLRLSCAASGRTFRYYSMGWFRQAPGKEREFVSAISWSGDSTYYGDSVKGRFTISRDNAKNTVYLQMDSLKPEDTAVYYCAGAFGSTVDNYDPSDPREYDTWGQGTQVTVS

SEQ ID NO: 966 - protein, 126 aa, Homo sapiens
MAHVQLVESGGGLVQAGGSLRLSCAASGRTFRSYTMGWFRQAPGKEREFVAAISWSGGSTYYADSVKGRFTISRDNAKTTVYLQMNSLKPEDTAVYYCAASKYYSGNYYSQVRYDYWGQGTQVTVS

SEQ ID NO: 967 - protein, 125 aa, Homo sapiens
MAHVQLVESGGGLVQAGGSLRLSCAASGRSFSSYSMGWFRQAPGKDREFVAAITARGMNPYYTDSVKGRFIISRDNAKNALYLQMNSLKREDTAVYYCVGRFRGDWGTQDAKWDYWGQGTQVTVS

SEQ ID NO: 968 - protein, 126 aa, Homo sapiens
MAHVQLVESGGGLVQAGGSLRLSCAASGRSFSSYDMGWFRRAPGKEREFVAAISGSRGSTDYSDSVKGRFTISRDNAKNTVYLQMNRLKPEDTAVYYCAAGFGSVDGLEYPISYDDWGQGTQVTVS

SEQ ID NO: 969 - protein, 126 aa, Homo sapiens
MAHVQLVESGGGLVQAGGSLRLSCAASGRSFSSLDMGWFRRAPGKEREFVAAISGSRGSTDYSDSVKGRFTISRDNAKNTVYLQMNRLKPEDAAVYYCAAGFGSVDGLEYPISYDDWGQGTQVTVS

SEQ ID NO: 970 - protein, 126 aa, Homo sapiens
MAHVQLVESGGGLVQAGGSLRLSCAASGRSFSSLDMGWFHRAPGKEREFVAAISGSRGSTDYSDSVKGRFTISRDNAKNTVYLQMNRLKPEDAAVYYCAAGFGSVDGLEYPISYDDWGQGTQVTVS

SEQ ID NO: 971 - protein, 127 aa, Homo sapiens
MAHVQLVESGGGLVQAGGSLRLSCAASGRSFDRYTMAWFRQGPGKEREFVATVGWNDNSIYYADSVKGRFTISRDNAKNTVYLQMNSLKPEDTAVYYCAATFGSPVDTPLDRGAYDFWGQGTQVTVS

SEQ ID NO: 972 - protein, 130 aa, Homo sapiens
MAHVQLVESGGGLVQAGGSLRLSCAASGRPFSSSDMGWFRQRPGKERDVVATINWTGDSTYYLDSVKGRFTISRDNAKNTVFLQMNSLKPEDTAVYYCAARGGGSSVDSEYDVGEFEYDYWGQGTQVTVS

SEQ ID NO: 973 - protein, 130 aa, Homo sapiens
MAHVQLVESGGGLVQAGGSLRLSCAASGRPFSSLVMGWFRQRPGKERDVVATINWTGDSTYYLDSVKGRFTISRDNAKNTVFLQMNSLKPEDTAVYYCAARGGGSSVDSEYDVGEFEYDYWGQGTQVTVS

SEQ ID NO: 974 - protein, 130 aa, Homo sapiens
MAHVQLVESGGGLVQAGGSLRLSCAASGRPFSSLNMGWFRQRPGKERDVVATINWTGDSTYYLDSVKGRFTISRDNAKNTVFLQMNSLKPEDTAVYYCAARGGGSSVDSEYDVGEFEYDYWGQGTQVTVS

SEQ ID NO: 975 - protein, 130 aa, Homo sapiens
MAHVQLVESGGGLVQAGGSLRLSCAASGRPFSSLGMGWFRQRPGKERDVVATINWTGDSTYYLDSVKGRFTISRDNAKNTVFLQMNSLKPEDTAVYYCAARGGGSSVDSEYDVGEFEYDYWGQGTQVTVS

SEQ ID NO: 976 - protein, 130 aa, Homo sapiens
MAHVQLVESGGGLVQAGGSLRLSCAASGRPFSSLDMVWFRQRPGKERDVVATINWTGDSTYYLDSVKGRFTISRDNAKNTVFLQMNSLKPEDTAVYYCAARGGGSSVDSEYDVGEFEYDYWGQGTQVTVS

SEQ ID NO: 977 - protein, 130 aa, Homo sapiens
MAHVQLVESGGGLVQAGGSLRLSCAASGRPFSSLDMGWLRQRPGKERDVVATINWTGDSTYYLDSVKGRFTISRDNAKNTVFLQMNSLKPEDTAVYYCAARGGGSSVDSEYDVGEFEYDYWGQGTQVTVS

SEQ ID NO: 978 - protein, 130 aa, Homo sapiens
MAHVQLVESGGGLVQAGGSLRLSCAASGRPFSSLDMGWLRQAPGKEREFVATISWTGGSTYYADSVKGRFTISRDNAKNTVYLQMNSLKPEDTAVYYCAARGGGTSVDSDYDVEEFEYDYWGQGTQVTVS

SEQ ID NO: 979 - protein, 130 aa, Homo sapiens
MAHVQLVESGGGLVQAGGSLRLSCAASGRPFSSLDMGWFRQRPGKERDVVATINWTSDSTYYLDSVKGRFTISRDNAKNTVFLQMNSLKPEDTAVYYCAARGGGSSVDSEYDVGEFEYDYWGQGTQVTVS

SEQ ID NO: 980 - protein, 130 aa, Homo sapiens
MAHVQLVESGGGLVQAGGSLRLSCAASGRPFSSLDMGWFRQRPGKERDVVATINWTGDYTYYLDSVKGRFTISRDNAKNTVFLQMNSLKPEDTAVYYCAARGGGSSVDSEYDVGEFEYDYWGQGTQVTVS

SEQ ID NO: 981 - protein, 130 aa, Homo sapiens
MAHVQLVESGGGLVQAGGSLRLSCAASGRPFSSLDMGWFRQRPGKERDVVATINWTGDSTYYSDSVKGRFTISRDNAKNTVFLQMNSLKPEDTAVYYCAARGGGSSVDSEYDVGEFEYDYWGQGTQVTVS

SEQ ID NO: 982 - protein, 130 aa, Homo sapiens
MAHVQLVESGGGLVQAGGSLRLSCAASGRPFSSLDMGWFRQRPGKERDVVATINWTGDSTYYLDSVKVRFTISRDNAKNTVFLQMNSLKPEDTAVYYCAARGGGSSVDSEYDVGEFEYDYWGQGTQVTVS

SEQ ID NO: 983 - protein, 130 aa, Homo sapiens
MAHVQLVESGGGLVQAGGSLRLSCAASGRPFSSLDMGWFRQRPGKERDVVATINWTGDSTYYLDSVKGRLTISRDNAKNTVFLQMNSLKPEDTAVYYCAARGGGSSVDSEYDVGEFEYDYWGQGTQVTVS

SEQ ID NO: 984 - protein, 130 aa, Homo sapiens
MAHVQLVESGGGLVQAGGSLRLSCAASGRPFSSLDMGWFRQRPGKERDVVATINWTGDSTYYLDSVKGRFTISSDNAKNTVFLQMNSLKPEDTAVYYCAARGGGSSVDSEYDVGEFEYDYWGQGTQVTVS

SEQ ID NO: 985 - protein, 130 aa, Homo sapiens
MAHVQLVESGGGLVQAGGSLRLSCAASGRPFSSLDMGWFRQRPGKERDVVATINWTGDSTYYLDSVKGRFTISRNNAKNTVFLQMNSLKPEDTAVYYCAARGGGSSVDSEYDVGEFEYDYWGQGTQVTVS

SEQ ID NO: 986 - protein, 130 aa, Homo sapiens
MAHVQLVESGGGLVQAGGSLRLSCAASGRPFSSLDMGWFRQRPGKERDVVATINWTGDSTYYLDSVKGRFTISRGNAKNTVFLQMNSLKPEDTAVYYCAARGGGSSVDSEYDVGEFEYDYWGQGTQVTVS

SEQ ID NO: 987 - protein, 130 aa, Homo sapiens
MAHVQLVESGGGLVQAGGSLRLSCAASGRPFSSLDMGWFRQRPGKERDVVATINWTGDSTYYLDSVKGRFTISRDNVKNTVFLQMNSLKPEDTAVYYCAARGGGSSVDSEYDVGEFEYDYWGQGTQVTVS

SEQ ID NO: 988 - protein, 130 aa, Homo sapiens
MAHVQLVESGGGLVQAGGSLRLSCAASGRPFSSLDMGWFRQRPGKERDVVATINWTGDSTYYLDSVKGRFTISRDNTKNTVFLQMNSLKPEDTAVYYCAARGGGSSVDSEYDVGEFEYDYWGQGTQVTVS

SEQ ID NO: 989 - protein, 130 aa, Homo sapiens
MAHVQLVESGGGLVQAGGSLRLSCAASGRPFSSLDMGWFRQRPGKERDVVATINWTGDSTYYLDSVKGRFTISRDNSKNTVFLQMNSLKPEDTAVYYCAARGGGSSVDSEYDVGEFEYDYWGQGTQVTVS

SEQ ID NO: 990 - protein, 130 aa, Homo sapiens
MAHVQLVESGGGLVQAGGSLRLSCAASGRPFSSLDMGWFRQRPGKERDVVATINWTGDSTYYLDSVKGRFTISRDNANNTVFLQMNSLKPEDTAVYYCAARGGGSSVDSEYDVGEFEYDYWGQGTQVTVS

SEQ ID NO: 991 - protein, 130 aa, Homo sapiens
MAHVQLVESGGGLVQAGGSLRLSCAASGRPFSSLDMGWFRQRPGKERDVVATINWTGDSTYYLDSVKGRFTISRDNAKNTVLLQMNSLKPEDTAVYYCAARGGGSSVDSEYDVGEFEYDYWGQGTQVTVS

SEQ ID NO: 992 - protein, 130 aa, Homo sapiens
MAHVQLVESGGGLVQAGGSLRLSCAASGRPFSSLDMGWFRQRPGKERDVVATINWTGDSTYYLDSVKGRFTISRDNAKNTVILQMNSLKPEDTAVYYCAARGGGSSVDSEYDVGEFEYDYWGQGTQVTVS

SEQ ID NO: 993 - protein, 130 aa, Homo sapiens
MAHVQLVESGGGLVQAGGSLRLSCAASGRPFSSLDMGWFRQRPGKERDVVATINWTGDSTYYLDSVKGRFTISRDNAKNTVFMQMNSLKPEDTAVYYCAARGGGSSVDSEYDVGEFEYDYWGQGTQVTVS

SEQ ID NO: 994 - protein, 130 aa, Homo sapiens
MAHVQLVESGGGLVQAGGSLRLSCAASGRPFSSLDMGWFRQRPGKERDVVATINWTGDSTYYLDSVKGRFTISRDNAKNTVFLQMNSRKPEDTAVYYCAARGGGSSVDSEYDVGEFEYDYWGQGTQVTVS

SEQ ID NO: 995 - protein, 130 aa, Homo sapiens
MAHVQLVESGGGLVQAGGSLRLSCAASGRPFSSLDMGWFRQRPGKERDVVATINWTGDSTYYLDSVKGRFTISRDNAKNTVFLQMNSPKPEDTAVYYCAARGGGSSVDSEYDVGEFEYDYWGQGTQVTVS

SEQ ID NO: 996 - protein, 130 aa, Homo sapiens
MAHVQLVESGGGLVQAGGSLRLSCAASGRPFSSLDMGWFRQRPGKERDVVATINWTGDSTYYLDSVKGRFTISRDNAKNTVFLQMNSMKPEDTAVYYCAARGGGSSVDSEYDVGEFEYDYWGQGTQVTVS

SEQ ID NO: 997 - protein, 130 aa, Homo sapiens
MAHVQLVESGGGLVQAGGSLRLSCAASGRPFSSLDMGWFRQRPGKERDVVATINWTGDSTYYLDSVKGRFTISRDNAKNTVFLQMNSLNPEDTAVYYCAARGGGSSVDSEYDVGEFEYDYWGQGTQVTVS

SEQ ID NO: 998 - protein, 130 aa, Homo sapiens
MAHVQLVESGGGLVQAGGSLRLSCAASGRPFSSLDMGWFRQRPGKERDVVATINWTGDSTYYLDSVKGRFTISRDNAKNTVFLQMNSLKPVDTAVYYCAARGGGSSVDSEYDVGEFEYDYWGQGTQVTVS

SEQ ID NO: 999 - protein, 130 aa, Homo sapiens
MAHVQLVESGGGLVQAGGSLRLSCAASGRPFSSLDMGWFRQRPGKERDVVATINWTGDSTYYLDSVKGRFTISRDNAKNTVFLQMNSLKPKDTAVYYCAARGGGSSVDSEYDVGEFEYDYWGQGTQVTVS

SEQ ID NO: 1000 - protein, 130 aa, Homo sapiens
MAHVQLVESGGGLVQAGGSLRLSCAASGRPFSSLDMGWFRQRPGKERDVVATINWTGDSTYYLDSVKGRFTISRDNAKNTVFLQMNSLKPGDTAVYYCAARGGGSSVDSEYDVGEFEYDYWGQGTQVTVS

SEQ ID NO: 1001 - protein, 130 aa, Homo sapiens
MAHVQLVESGGGLVQAGGSLRLSCAASGRPFSSLDMGWFRQRPGKERDVVATINWTGDSTYYLDSVKGRFTISRDNAKNTVFLQMNSLKPEDTVVYYCAARGGGSSVDSEYDVGEFEYDYWGQGTQVTVS

SEQ ID NO: 1002 - protein, 130 aa, Homo sapiens
MAHVQLVESGGGLVQAGGSLRLSCAASGRPFSSLDMGWFRQRPGKERDVVATINWTGDSTYYLDSVKGRFTISRDNAKNTVFLQMNSLKPEDTTVYYCAARGGGSSVDSEYDVGEFEYDYWGQGTQVTVS

SEQ ID NO: 1003 - protein, 130 aa, Homo sapiens
MAHVQLVESGGGLVQAGGSLRLSCAASGRPFSSLDMGWFRQRPGKERDVVATINWTGDSTYYLDSVKGRFTISRDNAKNTVFLQMNSLKPEDTSVYYCAARGGGSSVDSEYDVGEFEYDYWGQGTQVTVS

SEQ ID NO: 1004 - protein, 130 aa, Homo sapiens
MAHVQLVESGGGLVQAGGSLRLSCAASGRPFSSLDMGWFRQRPGKERDVVATINWTGDSTYYLDSVKGRFTISRDNAKNTVFLQMNSLKPEDTDVYYCAARGGGSSVDSEYDVGEFEYDYWGQGTQVTVS

SEQ ID NO: 1005 - protein, 130 aa, Homo sapiens
MAHVQLVESGGGLVQAGGSLRLSCAASGRPFSSLDMGWFRQRPGKERDVVATINWTGDSTYYLDSVKGRFTISRDNAKNTVFLQMNSLKPEDTAVYYCAARGGGSSVDSEYDVGEFVYDYWGQGTQVTVS

SEQ ID NO: 1006 - protein, 130 aa, Homo sapiens
MAHVQLVESGGGLVQAGGSLRLSCAASGRPFSSLDMGWFRQRPGKERDVVATINWTGDSTYYLDSVKGRFTISRDNAKNTVFLQMNSLKPEDTAVYYCAARGGGSSVDSEYDVGEFGYDYWGQGTQVTVS

SEQ ID NO: 1007 - protein, 130 aa, Homo sapiens
MAHVQLVESGGGLVQAGGSLRLSCAASGRPFSSLDMGWFRQRPGKERDVVATINWTGDSTYYLDSVKGRFTISRDNAKNTVFLQMNSLKPEDTAVYYCAARGGGSSVDSEYDVGEFEYNYWGQGTQVTVS

SEQ ID NO: 1008 - protein, 130 aa, Homo sapiens
MAHVQLVESGGGLVQAGGSLRLSCAASGRPFSSLDMGWFRQRPGKERDVVATINWTGDSTYYLDSVKGRFTISRDNAKNTVFLQMNSLKPEDTAVYYCAARGGGSSVDSEYDVGEFEYGYWGQGTQVTVS

SEQ ID NO: 1009 - protein, 130 aa, Homo sapiens
MAHVQLVESGGGLVQAGGSLRLSCAASGRPFSSLDMGWFRQRPGKERDVVATINWTGDSTYYLDSVKGRFTISRDNAKNTVFLQMNSLKPEDTAVYYCAARGGGSSVDSEYDVGEFEYDYWSQGTQVTVS

SEQ ID NO: 1010 - protein, 130 aa, Homo sapiens
MAHVQLVESGGGLVQAGGSLRLSCAASGRPFSSLDMGWFRQRPGKERDVVATINWTGDSTYYLDSVKGRFTISRDNAKNTVFLQMNSLKPEDTAVYYCAARGGGSSVDSEYDVGEFEYDYWGRGTQVTVS

SEQ ID NO: 1011 - protein, 130 aa, Homo sapiens
MAHVQLVESGGGLVQAGGSLRLSCAASGRPFSSLDMGWFRQRPGKERDVVATINWTGDSTYYLDSVKGRFTISRDNAKNTVFLQMNSLKPEDTAVYYCAARGGGSSVDSEYDVGEFEYDYWGQWTQVTVS

SEQ ID NO: 1012 - protein, 130 aa, Homo sapiens
MAHVQLVESGGGLVQAGGSLRLSCAASGRPFSSLDMGWFRQRPGKERDVVATINWTGDSTYYLDSVKGRFTISRDNAKNTVFLQMNSLKPEDTAVYYCAARGGGSSVDSEYDVGEFEYDYWGQGTQVTVS

SEQ ID NO: 1013 - protein, 129 aa, Homo sapiens
MAHVQLVESGGGLVQAGGSLRLSCAASGRPFSSLDMGWFRQRPGKERDVVATINWTGDSTYYLDSVKGRFTISRDNAKNTVFLQMNSLKPEDTAVYYCAARGGGSSVDSEYDVGEFEYDYWGQGPRSPS

SEQ ID NO: 1014 - protein, 130 aa, Homo sapiens
MAHVQLVESGGGLVQAGGSLRLSCAASGRPFSSLDMGWFRQRPGKERDVVATINWTGDSTYYLDSVKGRFTISRDNAKNTVFLQMNSLKPEDTAVYYCAARGGGSSVDSEYDVGEFEYDYWGQETQVTVS

SEQ ID NO: 1015 - protein, 130 aa, Homo sapiens
MAHVQLVESGGGLVQAGGSLRLSCAASGRPFSSLDMGWFRQRPGKERDVVATINWTGDSTYYLDSVKGRFTISRDNAKNTVFLQMNSLKPEDTAVYYCAARGGGSSVDSEYDVGEFEYDYWGKGTQVTVS

SEQ ID NO: 1016 - protein, 130 aa, Homo sapiens
MAHVQLVESGGGLVQAGGSLRLSCAASGRPFSSLDMGWFRQRPGKERDVVATINWTGDSTYYLDSVKGRFTISRDNAKNTVFLQMNSLKPEDTAVYYCAARGGGSSVDSEYDVGEFEYDYWGHGTQVTVS

SEQ ID NO: 1017 - protein, 130 aa, Homo sapiens
MAHVQLVESGGGLVQAGGSLRLSCAASGRPFSSLDMGWFRQRPGKERDVVATINWTGDSTYYLDSVKGRFTISRDNAKNTVFLQMNSLKPEDTAVYYCAARGGGSSVDSEYDVGEFEYDYWDQGTQVTVS

SEQ ID NO: 1018 - protein, 130 aa, Homo sapiens
MAHVQLVESGGGLVQAGGSLRLSCAASGRPFSSLDMGWFRQRPGKERDVVATINWTGDSTYYLDSVKGRFTISRDNAKNTVFLQMNSLKPEDTAVYYCAARGGGSSVDSEYDVGEFEYDYRGQGTQVTVS

SEQ ID NO: 1019 - protein, 130 aa, Homo sapiens
MAHVQLVESGGGLVQAGGSLRLSCAASGRPFSSLDMGWFRQRPGKERDVVATINWTGDSTYYLDSVKGRFTISRDNAKNTVFLQMNSLKPEDTAVYYCAARGGGSSVDSEYDVGEFEYDYLGQGTQVTVS

SEQ ID NO: 1020 - protein, 130 aa, Homo sapiens
MAHVQLVESGGGLVQAGGSLRLSCAASGRPFSSLDMGWFRQRPGKERDVVATINWTGDSTYYLDSVKGRFTISRDNAKNTVFLQMNSLKPEDTAVYYCAARGGGSSVDSEYDVGEFEYDYGGQGTQVTVS

SEQ ID NO: 1021 - protein, 130 aa, Homo sapiens
MAHVQLVESGGGLVQAGGSLRLSCAASGRPFSSLDMGWFRQRPGKERDVVATINWTGDSTYYLDSVKGRFTISRDNAKNTVFLQMNSLKPEDTAVYYCAARGGGSSVDSEYDVGEFEYDYCGQGTQVTVS

SEQ ID NO: 1022 - protein, 130 aa, Homo sapiens
MAHVQLVESGGGLVQAGGSLRLSCAASGRPFSSLDMGWFRQRPGKERDVVATINWTGDSTYYLDSVKGRFTISRDNAKNTVFLQMNSLKPEDTAVYYCAARGGGSSVDSEYDVGEFEYDDWGQGTQVTVS

SEQ ID NO: 1023 - protein, 130 aa, Homo sapiens
MAHVQLVESGGGLVQAGGSLRLSCAASGRPFSSLDMGWFRQRPGKERDVVATINWTGDSTYYLDSVKGRFTISRDNAKNTVFLQMNSLKPEDTAVYYCAARGGGSSVDSEYDVGEFEHDYWGQGTQVTVS

SEQ ID NO: 1024 - protein, 130 aa, Homo sapiens
MAHVQLVESGGGLVQAGGSLRLSCAASGRPFSSLDMGWFRQRPGKERDVVATINWTGDSTYYLDSVKGRFTISRDNAKNTVFLQMNSLKPEDTAVYYCAARGGGSSVDSEYDVGEFDYDYWGQGTQVTVS

SEQ ID NO: 1025 - protein, 130 aa, Homo sapiens
MAHVQLVESGGGLVQAGGSLRLSCAASGRPFSSLDMGWFRQRPGKERDVVATINWTGDSTYYLDSVKGRFTISRDNAKNTVFLQMNSLKPEDTAVYYCAARGGGSSVDSEYDVGEFAYDYWGQGTQVTVS

SEQ ID NO: 1026 - protein, 130 aa, Homo sapiens
MAHVQLVESGGGLVQAGGSLRLSCAASGRPFSSLDMGWFRQRPGKERDVVATINWTGDSTYYLDSVKGRFTISRDNAKNTVFLQMNSLKPEDTAIYYCAARGGGSSVDSEYDVGEFEYDYWGQGTQVTVS

SEQ ID NO: 1027 - protein, 130 aa, Homo sapiens
MAHVQLVESGGGLVQAGGSLRLSCAASGRPFSSLDMGWFRQRPGKERDVVATINWTGDSTYYLDSVKGRFTISRDNAKNTVFLQMNSLKPEDMAVYYCAARGGGSSVDSEYDVGEFEYDYWGQGTQVTVS

SEQ ID NO: 1028 - protein, 130 aa, Homo sapiens
MAHVQLVESGGGLVQAGGSLRLSCAASGRPFSSLDMGWFRQRPGKERDVVATINWTGDSTYYLDSVKGRFTISRDNAKNTVFLQMNSLKHEDTAVYYCAARGGGSSVDSEYDVGEFEYDYWGQGTQVTVS

SEQ ID NO: 1029 - protein, 130 aa, Homo sapiens
MAHVQLVESGGGLVQAGGSLRLSCAASGRPFSSLDMGWFRQRPGKERDVVATINWTGDSTYYLDSVKGRFTISRDNAKNTVFLQMNSLEPEDTAVYYCAARGGGSSVDSEYDVGEFEYDYWGQGTQVTVS

SEQ ID NO: 1030 - protein, 130 aa, Homo sapiens
MAHVQLVESGGGLVQAGGSLRLSCAASGRPFSSLDMGWFRQRPGKERDVVATINWTGDSTYYLDSVKGRFTISRDNAKNTVFLQMNRLKPEDTAVYYCAARGGGSSVDSEYDVGEFEYDYWGQGTQVTVS

SEQ ID NO: 1031 - protein, 130 aa, Homo sapiens
MAHVQLVESGGGLVQAGGSLRLSCAASGRPFSSLDMGWFRQRPGKERDVVATINWTGDSTYYLDSVKGRFTISRDNAKNTVFLQMNGLKPEDTAVYYCAARGGGSSVDSEYDVGEFEYDYWGQGTQVTVS

SEQ ID NO: 1032 - protein, 130 aa, Homo sapiens
MAHVQLVESGGGLVQAGGSLRLSCAASGRPFSSLDMGWFRQRPGKERDVVATINWTGDSTYYLDSVKGRFTISRDNAKNTVFLQINSLKPEDTAVYYCAARGGGSSVDSEYDVGEFEYDYWGQGTQVTVS

SEQ ID NO: 1033 - protein, 130 aa, Homo sapiens
MAHVQLVESGGGLVQAGGSLRLSCAASGRPFSSLDMGWFRQRPGKERDVVATINWTGDSTYYLDSVKGRFTISRDNAKNMVFLQMNSLKPEDTAVYYCAARGGGSSVDSEYDVGEFEYDYWGQGTQVTVS

SEQ ID NO: 1034 - protein, 130 aa, Homo sapiens
MAHVQLVESGGGLVQAGGSLRLSCAASGRPFSSLDMGWFRQRPGKERDVVATINWTGDSTYYLDSVKGRFTISRDNAKNAVFLQMNSLKPEDTAVYYCAARGGGSSVDSEYDVGEFEYDYWGQGTQVTVS

SEQ ID NO: 1035 - protein, 130 aa, Homo sapiens
MAHVQLVESGGGLVQAGGSLRLSCAASGRPFSSLDMGWFRQRPGKERDVVATINWTGDSTYYLDSVKGRFTISRDDAKNTVFLQMNSLKPEDTAVYYCAARGGGSSVDSEYDVGEFEYDYWGQGTQVTVS

SEQ ID NO: 1036 - protein, 130 aa, Homo sapiens
MAHVQLVESGGGLVQAGGSLRLSCAASGRPFSSLDMGWFRQRPGKERDVVATINWTGDSTYYLDSVKGRFTISKDNAKNTVFLQMNSLKPEDTAVYYCAARGGGSSVDSEYDVGEFEYDYWGQGTQVTVS

SEQ ID NO: 1037 - protein, 130 aa, Homo sapiens
MAHVQLVESGGGLVQAGGSLRLSCAASGRPFSSLDMGWFRQRPGKERDVVATINWTGDSTYYLDSVKGRFTISGDNAKNTVFLQMNSLKPEDTAVYYCAARGGGSSVDSEYDVGEFEYDYWGQGTQVTVS

SEQ ID NO: 1038 - protein, 130 aa, Homo sapiens
MAHVQLVESGGGLVQAGGSLRLSCAASGRPFSSLDMGWFRQRPGKERDVVATINWTGDSTYYLDSVKGRFSISRDNAKNTVFLQMNSLKPEDTAVYYCAARGGGSSVDSEYDVGEFEYDYWGQGTQVTVS

SEQ ID NO: 1039 - protein, 130 aa, Homo sapiens
MAHVQLVESGGGLVQAGGSLRLSCAASGRPFSSLDMGWFRQRPGKERDVVATINWTGDSTYYLDSVKGRFIISRDNAKNTVFLQMNSLKPEDTAVYYCAARGGGSSVDSEYDVGEFEYDYWGQGTQVTVS

SEQ ID NO: 1040 - protein, 130 aa, Homo sapiens
MAHVQLVESGGGLVQAGGSLRLSCAASGRPFSSLDMGWFRQRPGKERDVVATINWTGDSTYYLDSVKGQFTISRDNAKNTVFLQMNSLKPEDTAVYYCAARGGGSSVDSEYDVGEFEYDYWGQGTQVTVS

SEQ ID NO: 1041 - protein, 130 aa, Homo sapiens
MAHVQLVESGGGLVQAGGSLRLSCAASGRPFSSLDMGWFRQRPGKERDVVATINWTGDSTYYLDSVKDRFTISRDNAKNTVFLQMNSLKPEDTAVYYCAARGGGSSVDSEYDVGEFEYDYWGQGTQVTVS

SEQ ID NO: 1042 - protein, 130 aa, Homo sapiens
MAHVQLVESGGGLVQAGGSLRLSCAASGRPFSSLDMGWFRQRPGKERDVVATINWTGDSTYYLDSVKCRFTISRDNAKNTVFLQMNSLKPEDTAVYYCAARGGGSSVDSEYDVGEFEYDYWGQGTQVTVS

SEQ ID NO: 1043 - protein, 130 aa, Homo sapiens
MAHVQLVESGGGLVQAGGSLRLSCAASGRPFSSLDMGWFRQRPGKERDVVATINWTGDSTYYLDSMKGRFTISRDNAKNTVFLQMNSLKPEDTAVYYCAARGGGSSVDSEYDVGEFEYDYWGQGTQVTVS

SEQ ID NO: 1044 - protein, 130 aa, Homo sapiens
MAHVQLVESGGGLVQAGGSLRLSCAASGRPFSSLDMGWFRQRPGKERDVVATINWTGDSTYYLDSAKGRFTISRDNAKNTVFLQMNSLKPEDTAVYYCAARGGGSSVDSEYDVGEFEYDYWGQGTQVTVS

SEQ ID NO: 1045 - protein, 130 aa, Homo sapiens
MAHVQLVESGGGLVQAGGSLRLSCAASGRPFSSLDMGWFRQRPGKERDVVATINWTGDSTYYFDSVKGRFTISRDNAKNTVFLQMNSLKPEDTAVYYCAARGGGSSVDSEYDVGEFEYDYWGQGTQVTVS

SEQ ID NO: 1046 - protein, 130 aa, Homo sapiens
MAHVQLVESGGGLVQAGGSLRLSCAASGRPFSSLDMGWFRQRPGKERDVVATINWTGDSTHYLDSVKGRFTISRDNAKNTVFLQMNSLKPEDTAVYYCAARGGGSSVDSEYDVGEFEYDYWGQGTQVTVS

SEQ ID NO: 1047 - protein, 130 aa, Homo sapiens
MAHVQLVESGGGLVQAGGSLRLSCAASGRPFSSLDMGWFRQRPGKERDVVATINWTGDSTFYLDSVKGRFTISRDNAKNTVFLQMNSLKPEDTAVYYCAARGGGSSVDSEYDVGEFEYDYWGQGTQVTVS

SEQ ID NO: 1048 - protein, 130 aa, Homo sapiens
MAHVQLVESGGGLVQAGGSLRLSCAASGRPFSSLDMGWFRQRPGKERDVVATINWTGDSTCYLDSVKGRFTISRDNAKNTVFLQMNSLKPEDTAVYYCAARGGGSSVDSEYDVGEFEYDYWGQGTQVTVS

SEQ ID NO: 1049 - protein, 130 aa, Homo sapiens
MAHVQLVESGGGLVQAGGSLRLSCAASGRPFSSLDMGWFRQRPGKERDVVATINWTGDSIYYLDSVKGRFTISRDNAKNTVFLQMNSLKPEDTAVYYCAARGGGSSVDSEYDVGEFEYDYWGQGTQVTVS

SEQ ID NO: 1050 - protein, 130 aa, Homo sapiens
MAHVQLVESGGGLVQAGGSLRLSCAASGRPFSSLDMGWFRQRPGKERDVVATINWTGDNTYYLDSVKGRFTISRDNAKNTVFLQMNSLKPEDTAVYYCAARGGGSSVDSEYDVGEFEYDYWGQGTQVTVS

SEQ ID NO: 1051 - protein, 130 aa, Homo sapiens
MAHVQLVESGGGLVQAGGSLRLSCAASGRPFSSLDMGWFRQRPGKERDVVATINWTDDSTYYLDSVKGRFTISRDNAKNTVFLQMNSLKPEDTAVYYCAARGGGSSVDSEYDVGEFEYDYWGQGTQVTVS

SEQ ID NO: 1052 - protein, 130 aa, Homo sapiens
MAHVQLVESGGGLVQAGGSLRLSCAASGRPFSSLDMGWFRQRPGKERDVVATINWSGDSTYYLDSVKGRFTISRDNAKNTVFLQMNSLKPEDTAVYYCAARGGGSSVDSEYDVGEFEYDYWGQGTQVTVS

SEQ ID NO: 1053 - protein, 130 aa, Homo sapiens
MAHVQLVESGGGLVQAGGSLRLSCAASGRPFSSLDMGWFRQRPGKERDVVATINWIGDSTYYLDSVKGRFTISRDNAKNTVFLQMNSLKPEDTAVYYCAARGGGSSVDSEYDVGEFEYDYWGQGTQVTVS

SEQ ID NO: 1054 - protein, 130 aa, Homo sapiens
MAHVQLVESGGGLVQAGGSLRLSCAASGRPFSSLDMGWFRQRPGKERDVVATINWAGDSTYYLDSVKGRFTISRDNAKNTVFLQMNSLKPEDTAVYYCAARGGGSSVDSEYDVGEFEYDYWGQGTQVTVS

SEQ ID NO: 1055 - protein, 130 aa, Homo sapiens
MAHVQLVESGGGLVQAGGSLRLSCAASGRPFSSLDMGWFRQAPGKERETVATISWTGGSTYYADSVKGRFTISRDNAKKTVYLQMNSLKPEDTAVYYCAARGGGTSVDSDYDVGEFEYDYWGQGTQVTVS

SEQ ID NO: 1056 - protein, 130 aa, Homo sapiens
MAHVQLVESGGGLVQAGGSLRLSCAASGRPFSSLDMGWFRQAPGKEREFVATISWTGGSTYYVDSVKGRFTISRDNAKNTVYLQMNSLKPEDTAVYYCAARGGGTSVDSDYDVEEFEYDYWGQGTQVTVS

SEQ ID NO: 1057 - protein, 130 aa, Homo sapiens
MAHVQLVESGGGLVQAGGSLRLSCAASGRPFSSLDMGWFRQAPGKEREFVATISWTGGSTYYADSVKGRSTISRDNAKNTVYLQMNSLKPEDTAVYYCAARGGGTSVDSDYDVEEFEYDYWGQGTQVTVS

SEQ ID NO: 1058 - protein, 130 aa, Homo sapiens
MAHVQLVESGGGLVQAGGSLRLSCAASGRPFSSLDMGWFRQAPGKEREFVATISWTGGSTYYADSVKGRFTISRDNVKNTVYLQMNSLKPEDTAVYYCAARGGGTSVDSDYDVEEFEYDYWGQGTQVTVS

SEQ ID NO: 1059 - protein, 130 aa, Homo sapiens
MAHVQLVESGGGLVQAGGSLRLSCAASGRPFSSLDMGWFRQAPGKEREFVATISWTGGSTYYADSVKGRFTISRDNTKNTVYLQMNSLKPEDTAVYYCAARGGGTSVDSDYDVEEFEYDYWGQGTQVTVS

SEQ ID NO: 1060 - protein, 130 aa, Homo sapiens
MAHVQLVESGGGLVQAGGSLRLSCAASGRPFSSLDMGWFRQAPGKEREFVATISWTGGSTYYADSVKGRFTISRDNAKNTVYLQMNSPKPEDTAVYYCAARGGGTSVDSDYDVEEFEYDYWGQGTQVTVS

SEQ ID NO: 1061 - protein, 130 aa, Homo sapiens
MAHVQLVESGGGLVQAGGSLRLSCAASGRPFSSLDMGWFRQAPGKEREFVATISWTGGSTYYADSVKGRFTISRDNAKNTVYLQMNSLKPEDTVVYYCAARGGGTSVDSDYDVEEFEYDYWGQGTQVTVS

SEQ ID NO: 1062 - protein, 130 aa, Homo sapiens
MAHVQLVESGGGLVQAGGSLRLSCAASGRPFSSLDMGWFRQAPGKEREFVATISWTGGSTYYADSVKGRFTISRDNAKNTVYLQMNSLKPEDTTVYYCAARGGGTSVDSDYDVEEFEYDYWGQGTQVTVS

SEQ ID NO: 1063 - protein, 130 aa, Homo sapiens
MAHVQLVESGGGLVQAGGSLRLSCAASGRPFSSLDMGWFRQAPGKEREFVATISWTGGSTYYADSVKGRFTISRDNAKNTVYLQMNSLKPEDTAVYYCAARGGGTSVDSDYDVGEFEYDYWGQGTQVTVS

SEQ ID NO: 1064 - protein, 130 aa, Homo sapiens
MAHVQLVESGGGLVQAGGSLRLSCAASGRPFSSLDMGWFRQAPGKEREFVATISWTGGSTYYADSVKGRFTISRDNAKNTVYLQMNSLKPEDTAVYYCAARGGGTSVDSDYDVEEFGYDYWGQGTQVTVS

SEQ ID NO: 1065 - protein, 130 aa, Homo sapiens
MAHVQLVESGGGLVQAGGSLRLSCAASGRPFSSLDMGWFRQAPGKEREFVATISWTGGSTYYADSVKGRFTISRDNAKNTVYLQMNSLKPEDTAVYYCAARGGGTSVDSDYDVEEFEYDYWGQGTQVTVS

SEQ ID NO: 1066 - protein, 130 aa, Homo sapiens
MAHVQLVESGGGLVQAGGSLRLSCAASGRPFSSLDMGWFRQAPGKEREFVATISWTGGSTYYADSVKGRFTISRDNAKNTVYLQMNSLKPEDTAVYYCAARGGGTSVDSDYDVEEFEYDYWGKGTQVTVS

SEQ ID NO: 1067 - protein, 130 aa, Homo sapiens
MAHVQLVESGGGLVQAGGSLRLSCAASGRPFSSLDMGWFRQAPGKEREFVATISWTGGSTYYADSVKGRFTISRDNAKNTMYLQMNSLKPEDTAVYYCAARGGGTSVDSDYDVEEFEYDYWGQGTQVTVS

SEQ ID NO: 1068 - protein, 130 aa, Homo sapiens
MAHVQLVESGGGLVQAGGSLRLSCAASGRPFSSLDMGWFRQAPGKEREFVATISWTGGSTYYADSVKGRFTISRDNAKNMVYLQMNSLKPEDTAVYYCAARGGGTSVDSDYDVEEFEYDYWGQGTQVTVS

SEQ ID NO: 1069 - protein, 130 aa, Homo sapiens
MAHVQLVESGGGLVQAGGSLRLSCAASGRPFSSLDMGWFRQAPGKEREFVATISWTGGSTYYADSVKDRFTISRDNAKNTVYLQMNSLKPEDTAVYYCAARGGGTSVDSDYDVEEFEYDYWGQGTQVTVS

SEQ ID NO: 1070 - protein, 130 aa, Homo sapiens
MAHVQLVESGGGLVQAGGSLRLSCAASGRPFSSLDMGWFRQAPGKEREFVATISWTGGSTYYADSAKGRFTISRDNAKNTVYLQMNSLKPEDTAVYYCAARGGGTSVDSDYDVEEFEYDYWGQGTQVTVS

SEQ ID NO: 1071 - protein, 130 aa, Homo sapiens
MAHVQLVESGGGLVQAGGSLRLSCAASGRPFSSLDMGWFRQAPGKEREFVATISWTGGNTYYADSVKGRFTISRDNAKNTVYLQMNSLKPEDTAVYYCAARGGGTSVDSDYDVEEFEYDYWGQGTQVTVS

SEQ ID NO: 1072 - protein, 130 aa, Homo sapiens
MAHVQLVESGGGLVQAGGSLRLSCAASGRPFSSLDMGWFRQAPGKEREFVAAITWTGGSTYYTDSVKGRFTISRDNTKNTVYLQMNSLKPEDTAVYYCAARGGGTSVDNDYDVGEFEYDYWGQGTQVTVS

SEQ ID NO: 1073 - protein, 130 aa, Homo sapiens
MAHVQLVESGGGLVQAGGSLRLSCAASGRPFSSLDMGWFRQAPGKEREFVAAITWTGGSTYYTDSVKGRFTISRDNAKNTVYLQMNSLKSEDTAVYYCAARGGGTSVDNDYDVGEFEYDYWGQGTQVTVS

SEQ ID NO: 1074 - protein, 130 aa, Homo sapiens
MAHVQLVESGGGLVQAGGSLRLSCAASGRPFSSLDMGWFRQAPGKEREFVAAITWTGGSTYYTDSVKGRFTISRDNAKNTVYLQMNSLKPEDTTVYYCAARGGGTSVDNDYDVGEFEYDYWGQGTQVTVS

SEQ ID NO: 1075 - protein, 130 aa, Homo sapiens
MAHVQLVESGGGLVQAGGSLRLSCAASGRPFSSLDMGWFRQAPGKEREFVAAITWTGGSTYYTDSVKGRFTISRDNAKNTVYLQMNSLKPEDTAVYYCAARGGGTSVDNDYDVGEFEYDYWGQGTQVTVS

SEQ ID NO: 1076 - protein, 130 aa, Homo sapiens
MAHVQLVESGGGLVQAGGSLRLSCAASGRPFSSLDMGWFRQAPGKEREFVAAITWTGGSTYYTDSVKGRFTISRDNAKNTVYLQMNSLKPEDTAVYYCAARGGGTSVDNDYDVGEFEYDYWGHGTQVTVS

SEQ ID NO: 1077 - protein, 130 aa, Homo sapiens
MAHVQLVESGGGLVQAGGSLRLSCAASGRPFSSLDMGWFRQAPGKEREFVAAITWTGGSTYYTDSVKGRFTISRDNAKNTVYLQMNILKPEDTAVYYCAARGGGTSVDNDYDVGEFEYDYWGQGTQVTVS

SEQ ID NO: 1078 - protein, 130 aa, Homo sapiens
MAHVQLVESGGGLVQAGGSLRLSCAASGRPFSSLDMGWFRQAPGKEREFVAAITWTGGSTYYTDSVKGRFTISRDNAKNTVYLQMDSLKPEDTAVYYCAARGGGTSVDNDYDVGEFEYDYWGQGTQVTVS

SEQ ID NO: 1079 - protein, 130 aa, Homo sapiens
MAHVQLVESGGGLVQAGGSLRLSCAASGRPFSSLDMGWFRQAPGKEREFVAAITWTGGSTYYTDSVKGRFTISRDNAKNMVYLQMNSLKPEDTAVYYCAARGGGTSVDNDYDVGEFEYDYWGQGTQVTVS

SEQ ID NO: 1080 - protein, 130 aa, Homo sapiens
MAHVQLVESGGGLVQAGGSLRLSCAASGRPFSSLDMGWFRQAPGKEREFVAAITWTGGSTYYTDSVKGRFTISRDNAKNLVYLQMNSLKPEDTAVYYCAARGGGTSVDNDYDVGEFEFDYWGQGTQVTVS

SEQ ID NO: 1081 - protein, 130 aa, Homo sapiens
MAHVQLVESGGGLVQAGGSLRLSCAASGRPFSSLDMGWFRQAPGKEREFVAAITWTGGSTYYTDSMKGRFTISRDNAKNTVYLQMNSLKPEDTAVYYCAARGGGTSVDNDYDVGEFEYDYWGQGTQVTVS

SEQ ID NO: 1082 - protein, 130 aa, Homo sapiens
MAHVQLVESGGGLVQAGGSLRLSCAASGRPFSSLDMGWFRQAPGKEREFVAAITWTGGSIYYTDSVKGRFTISRDNAKNTVYLQMNSLKPEDTAVYYCAARGGGTSVDNDYDVGEFEYDYWGQGTQVTVS

SEQ ID NO: 1083 - protein, 130 aa, Homo sapiens
MAHVQLVESGGGLVQAGGSLRLSCAASGRPFSSLDMGWFRQAPGKERDIVATISWTGGTTYYTDSVKGRFTISRDNAKNTVYLQMNSLKPEDTAVYYCAARGGGTSVDSDYDVGEFEYDYWGQGTQVTVS

SEQ ID NO: 1084 - protein, 130 aa, Homo sapiens
MAHVQLVESGGGLVQAGGSLRLSCAASGRPFSSLDMGWFRQAPGKERDIVATISWTGGTTFYADSVKGRFTISRDNAKNTVYLQMSSLKPEDTAVYYCAARGGGTSVDSDYDVGEFEYDYWGQGTQVTVS

SEQ ID NO: 1085 - protein, 130 aa, Homo sapiens
MAHVQLVESGGGLVQAGGSLRLSCAASGRPFSSLDMGWFRQAPGKERDIVATISWTGGSTYYADSVKGRFTISRDNAKNTVYLQMNSLKPEDTAVYYCAARGGGTSVDSDYDVGEFEYDYWGQGTQVTVS

SEQ ID NO: 1086 - protein, 130 aa, Homo sapiens
MAHVQLVESGGGLVQAGGSLRLSCAASGRPFSSLDMGWFRQAPGKERDIVATISWTGGSTYYADSVKGRFTISRDNAKNTVYLQMNSLKPEDTAVYYCAARGGGTSVDSDYDVGEFDYDYWGQGTQVTVS

SEQ ID NO: 1087 - protein, 130 aa, Homo sapiens
MAHVQLVESGGGLVQAGGSLRLSCAASGRPFSSLDMGWFRQAPGKERDIVATISWTGGSTYYADSVKGRFTISRDNAKNTVYLQMNSLKPEDTAVYYCAARGGGTSVDSDYDVEEFDYDYWGQGTQVTVS

SEQ ID NO: 1088 - protein, 130 aa, Homo sapiens
MAHVQLVESGGGLVQAGGSLRLSCAASGRPFSSLDMGWFRQAPGKERDIVATISWTGGSTYYADSVKGRFTISRDNAKNTVYLQMNNLKPEDTAVYYCAARGGGTSVDSDYDVGEFEYDYWGQGTQVTVS

SEQ ID NO: 1089 - protein, 130 aa, Homo sapiens
MAHVQLVESGGGLVQAGGSLRLSCAASGRPFSSLDMGWFRQAPGKERDIVATISWTGGSTYYADSVKGRFTIFRDNAKNTVYLQMNSLKPEDTAVYYCAARGGGTSVDSDYDVGEFEYDYWGQGTQVTVS

SEQ ID NO: 1090 - protein, 130 aa, Homo sapiens
MAHVQLVESGGGLVQAGGSLRLSCAASGRPFSSLDMGWFRQAPGKERDIVATISWTGGMTYYADSVKGRFTISRDNAKNTVYLQMNSLKPEDTAVYYCAARGGGTSVDSDYDVGEFEYDYWGQGTQVTVS

SEQ ID NO: 1091 - protein, 130 aa, Homo sapiens
MAHVQLVESGGGLVQAGGSLRLSCAASGRPFSSLDMGWFRQAPGKERDIVATISWTGDSTYYADSVKGRFTISRDNAKNTVYLQMNSLKPEDTAVYYCAARGGGTSVDSDYDVGEFEYDYWGQGTQVTVS

SEQ ID NO: 1092 - protein, 130 aa, Homo sapiens
MAHVQLVESGGGLVQAGGSLRLSCAASGRPFSSLDMGWFRQAPGKERDIVATINWTGGSTYYADSVKGRFTISRDNAKNTVYLQMNSLKPEDTAVYYCAARGGGTSVDSDYDVGEFEYDYWGQGTQVTVS

SEQ ID NO: 1093 - protein, 130 aa, Homo sapiens
MAHVQLVESGGGLVQAGGSLRLSCAASGRPFSSLDMGRFRQRPGKERDVVATINWTGDSTYYLDSVKGRFTISRDNAKNTVFLQMNSLKPEDTAVYYCAARGGGSSVDSEYDVGEFEYDYWGQGTQVTVS

SEQ ID NO: 1094 - protein, 130 aa, Homo sapiens
MAHVQLVESGGGLVQAGGSLRLSCAASGRPFSSLDMDWFRQRPGKERDVVATINWTGDSTYYLDSVKGRFTISRDNAKNTVFLQMNSLKPEDTAVYYCAARGGGSSVDSEYDVGEFEYDYWGQGTQVTVS

SEQ ID NO: 1095 - protein, 130 aa, Homo sapiens
MAHVQLVESGGGLVQAGGSLRLSCAASGRPFSSLDMDWFRQRPGKERDVVATINWTGDNTYYLDSVKGRFTISRDNAKNTVFLQMNSLKPEDTAVYYCAARGGGSSVDSEYDVGEFEYDYWGQGTQVTVS

SEQ ID NO: 1096 - protein, 130 aa, Homo sapiens
MAHVQLVESGGGLVQAGGSLRLSCAASGRPFSSLDMDWFRQAPGKEREFVATISWTGGSTYYADSVKGRFTISRDNAKNTVYLQMNSLKPEDTAVYYCAARGGGTSVDSDYDVEEFEYDYWGQGTQVTVS

SEQ ID NO: 1097 - protein, 130 aa, Homo sapiens
MAHVQLVESGGGLVQAGGSLRLSCAASGRPFSSLDIGWFRQRPGKERDVVATINWTGDSTYYLDSVKGRFTISRDNAKNTVFLQMNSLKPEDTAVYYCAARGGGSSVDSEYDVGEFEYDYWGQGTQVTVS

SEQ ID NO: 1098 - protein, 130 aa, Homo sapiens
MAHVQLVESGGGLVQAGGSLRLSCAASGRPFSSLAMGWFRQRPGKERDVVATINWTGDSTYYLDSVKGRFTISRDNAKNTVFLQMNSLKPEDTAVYYCAARGGGSSVDSEYDVGEFEYDYWGQGTQVTVS

SEQ ID NO: 1099 - protein, 130 aa, Homo sapiens
MAHVQLVESGGGLVQAGGSLRLSCAASGRPFSSFDMGWFRQRPGKERDVVATINWTGDSTYYLDSVKGRFTISRDNAKNTVFLQMNSLKPEDTAVYYCAARGGGSSVDSEYDVGEFEYDYWGQGTQVTVS

SEQ ID NO: 1100 - protein, 130 aa, Homo sapiens
MAHVQLVESGGGLVQAGGSLRLSCAASGRPFSNLDMGWFRQRPGKERDVVATINWTGDSTYYLDSVKGRFTISRDNAKNTVFLQMNSLKPEDTAVYYCAARGGGSSVDSEYDVGEFEYDYWGQGTQVTVS

SEQ ID NO: 1101 - protein, 130 aa, Homo sapiens
MAHVQLVESGGGLVQAGGSLRLSCAASGRPFRSLDMGWFRQRPGKERDVVATINWTGDSTYYLDSVKGRFTISRDNAKNTVFLQMNSLKPEDTAVYYCAARGGGSSVDSEYDVGEFEYDYWGQGTQVTVS

SEQ ID NO: 1102 - protein, 130 aa, Homo sapiens
MAHVQLVESGGGLVQAGGSLRLSCAASGRPFNMYGMGWFRQALGKEREFVATVSWTGSSTNYADSVKGRFTISRDNAKNTVYLEMNSLKPEDTAVYYCAARGGGTSVDSDYDVGEFEYDYWGQGTQVTVS

SEQ ID NO: 1103 - protein, 130 aa, Homo sapiens
MAHVQLVESGGGLVQAGGSLRLSCAASGRPFNMYDMGWFRQTLGKEREFVATVSWTGSSTNYADSVKGRFTISRDNAKNTVYLEMNSLKPEDTAVYYCAARGGGTSVDSDYDVGEFEYDYWGQGTQVTVS

SEQ ID NO: 1104 - protein, 130 aa, Homo sapiens
MAHVQLVESGGGLVQAGGSLRLSCAASGRPFNMYDMGWFRQALGQEREFVATVSWTGSSTNYADSVKGRFTISRDNAKNTVYLEMNSLKPEDTAVYYCAARGGGTSVDSDYDVGEFEYDYWGQGTQVTVS

SEQ ID NO: 1105 - protein, 130 aa, Homo sapiens
MAHVQLVESGGGLVQAGGSLRLSCAASGRPFNMYDMGWFRQALGKEREFVVTVSWTGSSTNYADSVKGRFTISRDNAKNTVYLEMNSLKPEDTAVYYCAARGGGTSVDSDYDVGEFEYDYWGQGTQVTVS

SEQ ID NO: 1106 - protein, 130 aa, Homo sapiens
MAHVQLVESGGGLVQAGGSLRLSCAASGRPFNMYDMGWFRQALGKEREFVATVSWTGSSTNYANSVKGRFTISRDNAKNTVYLEMNSLKPEDTAVYYCAARGGGTSVDSDYDVGEFEYDYWGQGTQVTVS

SEQ ID NO: 1107 - protein, 130 aa, Homo sapiens
MAHVQLVESGGGLVQAGGSLRLSCAASGRPFNMYDMGWFRQALGKEREFVATVSWTGSSTNYADSVKGRFTISRDNTKNTVYLEMNSLKPEDTAVYYCAARGGGTSVDSDYDVGEFEYDYWGQGTQVTVS

SEQ ID NO: 1108 - protein, 130 aa, Homo sapiens
MAHVQLVESGGGLVQAGGSLRLSCAASGRPFNMYDMGWFRQALGKEREFVATVSWTGSSTNYADSVKGRFTISRDNAKNTVYLEMNSMKPEDTAVYYCAARGGGTSVDSDYDVGEFEYDYWGQGTQVTVS

SEQ ID NO: 1109 - protein, 130 aa, Homo sapiens
MAHVQLVESGGGLVQAGGSLRLSCAASGRPFNMYDMGWFRQALGKEREFVATVSWTGSSTNYADSVKGRFTISRDNAKNTVYLEMNSLKPEDTTVYYCAARGGGTSVDSDYDVGEFEYDYWGQGTQVTVS

SEQ ID NO: 1110 - protein, 130 aa, Homo sapiens
MAHVQLVESGGGLVQAGGSLRLSCAASGRPFNMYDMGWFRQALGKEREFVATVSWTGSSTNYADSVKGRFTISRDNAKNTVYLEMNSLKPEDTAVYYCAARGGGTSVDSDYDVGEFKYDYWGQGTQVTVS

SEQ ID NO: 1111 - protein, 130 aa, Homo sapiens
MAHVQLVESGGGLVQAGGSLRLSCAASGRPFNMYDMGWFRQALGKEREFVATVSWTGSSTNYADSVKGRFTISRDNAKNTVYLEMNSLKPEDTAVYYCAARGGGTSVDSDYDVGEFEYDYWGQGTQVTVS

SEQ ID NO: 1112 - protein, 130 aa, Homo sapiens
MAHVQLVESGGGLVQAGGSLRLSCAASGRPFNMYDMGWFRQALGKEREFVATVSWTGSSTNYADSVKGRFTISRDNAKNTVYLEMNSLKPEDTAIYYCAARGGGTSVDSDYDVGEFEYDYWGQGTQVTVS

SEQ ID NO: 1113 - protein, 130 aa, Homo sapiens
MAHVQLVESGGGLVQAGGSLRLSCAASGRPFNMYDMGWFRQALGKEREFVATVSWTGSSTNYADSVKGRFTISRDNAKNTVYLEMNNLKPEDTAVYYCAARGGGTSVDSDYDVGEFEYDYWGQGTQVTVS

SEQ ID NO: 1114 - protein, 130 aa, Homo sapiens
MAHVQLVESGGGLVQAGGSLRLSCAASGRPFNMYDMGWFRQALGKEREFVATVSWTGSSTNYADSVKGRFTISRDNAKNTMYLEMNSLKPEDTAVYYCAARGGGTSVDSDYDVGEFEYDYWGQGTQVTVS

SEQ ID NO: 1115 - protein, 130 aa, Homo sapiens
MAHVQLVESGGGLVQAGGSLRLSCAASGRPFNMYDMGWFRQALGKEREFVATVSWTGSSTNYADSVKGRFIISRDNAKNTVYLEMNSLKPEDTAVYYCAARGGGTSVDSDYDVGEFEYDYWGQGTQVTVS

SEQ ID NO: 1116 - protein, 130 aa, Homo sapiens
MAHVQLVESGGGLVQAGGSLRLSCAASGRPFNMYDMGWFRQALGKEREFVATVSWTGSSTNYADSVKGQFTISRDNAKNTVYLEMNSLKPEDTAVYYCAARGGGTSVDSDYDVGEFEYDYWGQGTQVTVS

SEQ ID NO: 1117 - protein, 130 aa, Homo sapiens
MAHVQLVESGGGLVQAGGSLRLSCAASGRPFNMYDMGWFRQALGKEREFVATVSWTGSSTNYADSVKDRFTISRDNAKNTVYLEMNSLKPEDTAVYYCAARGGGTSVDSDYDVGEFEYDYWGQGTQVTVS

SEQ ID NO: 1118 - protein, 130 aa, Homo sapiens
MAHVQLVESGGGLVQAGGSLRLSCAASGRPFNMYDMGWFHQALGKEREFVATVSWTGSSTNYADSVKGRFTISRDNAKNTVYLEMNSLKPEDTAVYYCAARGGGTSVDSDYDVGEFEYDYWGQGTQVTVS

SEQ ID NO: 1119 - protein, 130 aa, Homo sapiens
MAHVQLVESGGGLVQAGGSLRLSCAASGRPFNMYDMDWFRQALGKEREFVATVSWTGSSTNYADSVKGRFTISRDNAKNTVYLEMNSLKPEDTAVYYCAARGGGTSVDSDYDVGEFEYDYWGQGTQVTVS

SEQ ID NO: 1120 - protein, 130 aa, Homo sapiens
MAHVQLVESGGGLVQAGGSLRLSCAASGRPFNLYDMGWFRQALGKEREFVATVSWTGSSTNYADSVKGRFTISRDNAKNTVYLEMNSLKPEDTAVYYCAARGGGTSVDSDYDVGEFEYDYWGQGTQVTVS

SEQ ID NO: 1121 - protein, 129 aa, Homo sapiens
MAHVQLVESGGGLVQAGGSLRLSCAASGRAFSSYTMGWFHQAPWKEREFVAEISGTGGNTGYADSVKGRFTISRDNAKNTVYLQMNSLKPEDTAVYYCAAVIGSPTDSTDYRSSLDYDYWGQGTQVTVS

SEQ ID NO: 1122 - protein, 129 aa, Homo sapiens
MAHVQLVESGGGLVQAGGSLRLSCAASGRAFSSYTMGWFHQAPGKEREFVAEISGTGGNTGYADSVKGRFTISRDNAKNTVYLQMNSLKPEDTAVYYCAAVIGSPTDSTDYRSSLDYDYWGQGTQVTVS

SEQ ID NO: 1123 - protein, 129 aa, Homo sapiens
MAHVQLVESGGGLVQAGGSLRLSCAASGRAFSSYTMGWFHQAPGKEREFVAEISGTGGNTGYADSVKGRFTISRDNAKNTVYLQMNSLKPEDTAVYYCAAVIGSPTDSTDYRSSLDYDYWGHGTQVTVS

SEQ ID NO: 1124 - protein, 129 aa, Homo sapiens
MAHVQLVESGGGLVQAGGSLRLSCAASGRAFSSYTMGWFHQAPGKEREFVAEISGTGGNTGYADSVKGRFTISRDNAKNTVYLQMNSLKPEDTAVYYCAAVIGSPADSTDYRSSLDYDYWGQGTQVTVS

SEQ ID NO: 1125 - protein, 129 aa, Homo sapiens
MAHVQLVESGGGLVQAGGSLRLSCAASGRAFNTYTMGWFRQAPGLERDFVAEISWSGGSTGYADSVKGRFTISRDNAKNTVYLQMNSLKPQDTAVYYCAAVIGSPTDYSDYRSSLDYDYWGQGTQVTVS

SEQ ID NO: 1126 - protein, 127 aa, Homo sapiens
MAHVQLVESGGGLVQAGGSLRLSCAASGRAFDRYTMAWFRQGPGKEREFVATVGWNDNSIYYADSVKGRFTISRDNAKNTVYLQMNSLKPEDTAVYYCAATFGSPVDTPLDRGAYDFWGQGTQVTVS

SEQ ID NO: 1127 - protein, 129 aa, Homo sapiens
MAHVQLVESGGGLVQAGGSLRLSCAASGPSMNWYGMAWFRQSPGKERELVADVSWSGGSTYYRDSVKGRFTISRDNAKNTVYLQMNGLKPEDTAVYYCAARTSSSVDPWNYVGVGDYDYWGQGTQVTVS

SEQ ID NO: 1128 - protein, 130 aa, Homo sapiens
MAHVQLVESGGGLVQAGGSLRLSCAASGLPFSSLDMGWFRQRPGKERDVVATINWTGDSTYYLDSVKGRFTISRDNAKNTVFLQMNSLKPEDTAVYYCAARGGGSSVDSEYDVGEFEYDYWGQGTQVTVS

SEQ ID NO: 1129 - protein, 130 aa, Homo sapiens
MAHVQLVESGGGLVQAGGSLRLSCAASGFTLDYYGIGWFRQAPGKEREGVSCIDSSGGSTFYADSVKGRFTISRDNAKNTLYLQMNSLKPEDTAVYYCAAVLGDSVDYGMGYCNLDEYDYWGQGTQVTVS

SEQ ID NO: 1130 - protein, 127 aa, Homo sapiens
MAHVQLVESGGGLVQAGGSLRLSCAAAGRTSSDYAMGWFRQAPGKEREFVAAVNWSGVSTYYADSVKGRFTISRDNAKNTVHLQMNSLKPEDTAVYYCAAEKLESLRNWHDPLMYDYWGQGTQVTVS

SEQ ID NO: 1131 - protein, 127 aa, Homo sapiens
MAHVQLVESGGGLVQAGGSLRLSCAAAGRTSSDYAMGWFRQAPGKEREFVAAINWSGISTYYADSVKGRFTISRDNAKNTVHLQMNSLKPEDTAVYYCAAEKLESLREWHDPLMYDYWGQGTQVTVS

SEQ ID NO: 1132 - protein, 127 aa, Homo sapiens
MAHVQLVESGGGLVQAGGSLRLSCAAAGRTSSDYAMGWFRQAPGEERVFVAAINWSGISTYYADSVKGRFTISRDNAKNTVHLQMNSLKPEDTAVYYCAAEKLESLRNWHDPLMYDYWGQGTQVTVS

SEQ ID NO: 1133 - protein, 127 aa, Homo sapiens
MAHVQLVESGGGLVQAGGSLMLSCAAARRTSNDYAMGWFRQAPGKEREFVAAINWSGISTYYADSVKGRFTISRDSAKNTVHLQMNSLKPEDTAVYYCAAEKLESLRNWHDPLMYDYWGQGTQVTVS

SEQ ID NO: 1134 - protein, 127 aa, Homo sapiens
MAHVQLVESGGGLVQAGGSLMLSCAAAGRTSNDYAMGWFRQAPGKEREFVAAINWSGISTYYADSVKGRFTISRDNAKNTVHLQMNSLKPEDTAVYYCAAEKLESLRMWHDPLMYDYWGQGTQVTVS

SEQ ID NO: 1135 - protein, 130 aa, Homo sapiens
MAHVQLVESGGGLVQAGGSLGLSCAASGRPFSSLDMGWFRQRPGKERDVVATINWTGDSTYYLDSVKGRFTISRDNAKNTVFLQMNSLKPEDTAVYYCAARGGGSSVDSEYDVGEFEYDYWGQGTQVTVS

SEQ ID NO: 1136 - protein, 130 aa, Homo sapiens
MAHVQLVESGGGLVQAGGPLRLSCAASGRPFSSLDMGWFRQRPGKERDVVATINWTGDSTYYLDSVKGRFTISRDNAKNTVFLQMNSLKPEDTAVYYCAARGGGSSVDSEYDVGEFEYDYWGQGTQVTVS

SEQ ID NO: 1137 - protein, 133 aa, Homo sapiens
MAHVQLVESGGGLVQAGDSLRLSCVASVASGRTFGWYDMGWFRQAPGKEREFVAAISWSGGSTYYADSVKGRSTISRDNAKNTVYLQMNSLKPEDTAVYYCAARGGGTSVDSDYDVGEFEYDYWGQGTQVTVS

SEQ ID NO: 1138 - protein, 127 aa, Homo sapiens
MAHVQLVESGGGLVQAGDSLRLSCTASGRTFSTYTMAWFRQAPGKEREFVAAISWSGTYYADSVKGRFTISRDNAKNTVYLQMNSLKPEDTAVYYCAAVIGSTVDTYNPSDPLEYDYWGQGTQVTVS

SEQ ID NO: 1139 - protein, 127 aa, Homo sapiens
MAHVQLVESGGGLVQAGDSLRLSCTASGRTFSTYTMAWFRQAPGKEREFVAAISWSGTYYADSVKGRFTISRDNAKNTVYLQMNSLKPEDTAVYYCAAVIGSTVDSYSPSDPLEYDYWGQGTQVTVS

SEQ ID NO: 1140 - protein, 127 aa, Homo sapiens
MAHVQLVESGGGLVQAGDSLRLSCTASGRTFSTYTMAWFRQAPGKEREFVAAISWSGTYYADSVKGRFTISRDNAKNTVYLQMNSLKPEDTAVYYCAAVIGSTIDTYSPSDPLEYDYWGQGTQVTVS

SEQ ID NO: 1141 - protein, 127 aa, Homo sapiens
MAHVQLVESGGGLVQAGDSLRLSCTASGRTFSTYTMAWFRQAPGKEREFVAAISWSGAYYAESVKGRFTISRDNAKNTVYLQMNSLKPEDTAVYYCAAVIGSTVDSYSPSDPLEYDYWGQGTQVTVS

SEQ ID NO: 1142 - protein, 129 aa, Homo sapiens
MAHVQLVESGGGLVQAGDSLRLSCAASGRTFSTYTMGWFRQAPGKEREFVAHINWSGSSTYYADSVKGRFTISRDNAKNTMYLQMNSLKPEDTAVYYCAVTIGSPVDSYRHSDPLEYDYWGQGTQVTVS

SEQ ID NO: 1143 - protein, 129 aa, Homo sapiens
MAHVQLVESGGGLVQAGDSLRLSCAASGRTFSTYTMGWFRQAPGKEREFVAHINWSGSSTYYADSVKGRFTISRDNAKNTMYLQMNSLKPDDTAVYYCAVTIGSPVDSYRHSDPLEYDYWGQGTQVTVS

SEQ ID NO: 1144 - protein, 130 aa, Homo sapiens
MAHVQLVESGGGLVQAGDSLRLSCAASGRPFSSLDMGWFRQRPGKERDVVATINWTGDSTYYLDSVKGRFTISRDNAKNTVFLQMNSLKPEDTAVYYCAARGGGSSVDSEYDVGEFEYDYWGQGTQVTVS

SEQ ID NO: 1145 - protein, 130 aa, Homo sapiens
MAHVQLVESGGGLVQAGDSLRLSCAASGRPFSSLDMGWFRQAPGKEREFVAAITWTGGSTYYTDSVKGRFTISRDNAKNTVYLQMNSLKPEDTAVYYCAARGGGTSVDNDYDVGEFEYDYWGQGTQVTVS

SEQ ID NO: 1146 - protein, 129 aa, Homo sapiens
MAHVQLVESGGGLVQAGDSLRLSCAASGRAFSSYTMGWFHQAPGKEREFVAEISGTGGNTGYADSVKGRFTISRDNAKNTVYLQMNSLKPEDTAVYYCAAVIGSPTDSTDYRSSLDYDYWGQGTQVTVS

SEQ ID NO: 1147 - protein, 127 aa, Homo sapiens
MAHVQLVESGGGLVQAGDSLRLSCAASGITFRWYTMAWFRQAPGKERDFVATINWSGSDTNYADSVKGRFTISRDNAKNTVTLQMNSLQPEDTAVYYCAGVPGTSLSGETDPRDYDYWGQGTQVTVS

SEQ ID NO: 1148 - protein, 130 aa, Homo sapiens
MAHVQLVESGGGLVQAGASLTLSCAASGRSFSTYHMGWFRQAPGKEREFVATISWTGGSTYYADSVKGRFTISRDNAKNTVYLQMNSLKPEDTAVYYCAARGGGTSVDSDYDVEEFEYDYWGQGTQVTVS

SEQ ID NO: 1149 - protein, 129 aa, Homo sapiens
MAHVQLVESGGGLVQAGASLRLSCVASGGTFSSYAMAWFRQAPGKEREFVAEDSWSNHRVWYSDSVKGRFTISRDNAKNTVYLQMNNLKPEDTAVYYCAAYRDYSGSTVDPPNQSEYDYWGQGTQVTVS

SEQ ID NO: 1150 - protein, 129 aa, Homo sapiens
MAHVQLVESGGGLVQAGASLRLSCAASGGTFSSYVMAWFRQAPGKEREFVAEDSWSNHRVWYSDSVKGRFTISRDNAKNTVYLQMNNLKPEDTAVYYCAAYRDYSGSTVDPPNQSEYDYWGQGTQVTVS

SEQ ID NO: 1151 - protein, 129 aa, Homo sapiens
MAHVQLVESGGGLVQAGASLRLSCAASGGTFSSYAMAWFRQAPWKEREFVAEDSWSNHRVWYSDSVKGRFTISRDNAKNTVYLQMNNLKPEDTAVYYCAAYRDYSGSTVDPPNQSEYDYWGQGTQVTVS

SEQ ID NO: 1152 - protein, 129 aa, Homo sapiens
MAHVQLVESGGGLVQAGASLRLSCAASGGTFSSYAMAWFRQAPGKERKFVAEDSWSNHRVWYSDSVKGRFTISRDNAKNTVYLQMNNLKPEDTAVYYCAAYRDYSGSTVDPPNQSEYDYWGQGTQVTVS

SEQ ID NO: 1153 - protein, 129 aa, Homo sapiens
MAHVQLVESGGGLVQAGASLRLSCAASGGTFSSYAMAWFRQAPGKEREFVAKDSWSNHRVWYSDSVKGRFTISRDNAKNTVYLQMNNLKPEDTAVYYCAAYRDYSGSTVDPPNQSEYDYWGQGTQVTVS

SEQ ID NO: 1154 - protein, 129 aa, Homo sapiens
MAHVQLVESGGGLVQAGASLRLSCAASGGTFSSYAMAWFRQAPGKEREFVAEDSWSNHRVWYSDSVKGRFTISRDNAKNTVYLQMNNMKPEDTAVYYCAAYRDYSGSTVDPPNQSEYDYWGQGTQVTVS

SEQ ID NO: 1155 - protein, 129 aa, Homo sapiens
MAHVQLVESGGGLVQAGASLRLSCAASGGTFSSYAMAWFRQAPGKEREFVAEDSWSNHRVWYSDSVKGRFTISRDNAKNTVYLQMNNLKPEDTTVYYCAAYRDYSGSTVDPPNQSEYDYWGQGTQVTVS

SEQ ID NO: 1156 - protein, 129 aa, Homo sapiens
MAHVQLVESGGGLVQAGASLRLSCAASGGTFSSYAMAWFRQAPGKEREFVAEDSWSNHRVWYSDSVKGRFTISRDNAKNTVYLQMNNLKPEDTAVYYCVAYRDYSGSTVDPPNQSEYDYWGQGTQVTVS

SEQ ID NO: 1157 - protein, 129 aa, Homo sapiens
MAHVQLVESGGGLVQAGASLRLSCAASGGTFSSYAMAWFRQAPGKEREFVAEDSWSNHRVWYSDSVKGRFTISRDNAKNTVYLQMNNLKPEDTAVYYCEAYRDYSGSTVDPPNQSEYDYWGQGTQVTVS

SEQ ID NO: 1158 - protein, 129 aa, Homo sapiens
MAHVQLVESGGGLVQAGASLRLSCAASGGTFSSYAMAWFRQAPGKEREFVAEDSWSNHRVWYSDSVKGRFTISRDNAKNTVYLQMNNLKPEDTAVYYCAVYRDYSGSTVDPPNQSEYDYWGQGTQVTVS

SEQ ID NO: 1159 - protein, 129 aa, Homo sapiens
MAHVQLVESGGGLVQAGASLRLSCAASGGTFSSYAMAWFRQAPGKEREFVAEDSWSNHRVWYSDSVKGRFTISRDNAKNTVYLQMNNLKPEDTAVYYCASYRDYSGSTVDPPNQSEYDYWGQGTQVTVS

SEQ ID NO: 1160 - protein, 129 aa, Homo sapiens
MAHVQLVESGGGLVQAGASLRLSCAASGGTFSSYAMAWFRQAPGKEREFVAEDSWSNHRVWYSDSVKGRFTISRDNAKNTVYLQMNNLKPEDTAVYYCADYRDYSGSTVDPPNQSEYDYWGQGTQVTVS

SEQ ID NO: 1161 - protein, 129 aa, Homo sapiens
MAHVQLVESGGGLVQAGASLRLSCAASGGTFSSYAMAWFRQAPGKEREFVAEDSWSNHRVWYSDSVKGRFTISRDNAKNTVYLQMNNLKPEDTAVYYCAAYRNYSGSTVDPPNQSEYDYWGQGTQVTVS

SEQ ID NO: 1162 - protein, 129 aa, Homo sapiens
MAHVQLVESGGGLVQAGASLRLSCAASGGTFSSYAMAWFRQAPGKEREFVAEDSWSNHRVWYSDSVKGRFTISRDNAKNTVYLQMNNLKPEDTAVYYCAAYRDYSGSTVDPPNQSEYDYWGRGTQVTVS

SEQ ID NO: 1163 - protein, 128 aa, Homo sapiens
MAHVQLVESGGGLVQAGASLRLSCAASGGTFSSYAMAWFRQAPGKEREFVAEDSWSNHRVWYSDSVKGRFTISRDNAKNTVYLQMNNLKPEDTAVYYCAAYRDYSGSTVDPPNQSEYDYWGQGPRSPS

SEQ ID NO: 1164 - protein, 129 aa, Homo sapiens
MAHVQLVESGGGLVQAGASLRLSCAASGGTFSSYAMAWFRQAPGKEREFVAEDSWSNHRVWYSDSVKGRFTISRDNAKNTVYLQMNNLKPEDTAVYYCAAYRDYSGSTVDPPNQSEYDYWGHGTQVTVS

SEQ ID NO: 1165 - protein, 129 aa, Homo sapiens
MAHVQLVESGGGLVQAGASLRLSCAASGGTFSSYAMAWFRQAPGKEREFVAEDSWSNHRVWYSDSVKGRFTISRDNAKNTVYLQMNNLKPEDTAVYYCAAYRDYSGSTVDPPNQSEYDYLGQGTQVTVS

SEQ ID NO: 1166 - protein, 129 aa, Homo sapiens
MAHVQLVESGGGLVQAGASLRLSCAASGGTFSSYAMAWFRQAPGKEREFVAEDSWSNHRVWYSDSVKGRFTISRDNAKNTVYLQMNNLKPEDTAVYYCAAYRDYSGSTVDPPNQSEYDYGGQGTQVTVS

SEQ ID NO: 1167 - protein, 129 aa, Homo sapiens
MAHVQLVESGGGLVQAGASLRLSCAASGGTFSSYAMAWFRQAPGKEREFVAEDSWSNHRVWYSDSVKGRFTISRDNAKNTVYLQMNNLKPEDTAVYYCAAYRDYSGSTVDPPNQSEYDDWGQGTQVTVS

SEQ ID NO: 1168 - protein, 129 aa, Homo sapiens
MAHVQLVESGGGLVQAGASLRLSCAASGGTFSSYAMAWFRQAPGKEREFVAEDSWSNHRVWYSDSVKGRFTISRDNAKNTVYLQMNNLKPEDTAVYYCAAYCDYSGSTVDPPNQSEYDYWGQGTQVTVS

SEQ ID NO: 1169 - protein, 129 aa, Homo sapiens
MAHVQLVESGGGLVQAGASLRLSCAASGGTFSSYAMAWFRQAPGKEREFVAEDSWSNHRVWYSDSVKGRFTISRDNAKNTVYLQMNNLKPEDTAVYYCAADRDYSGSTVDPPNQSEYDYWGQGTQVTVS

SEQ ID NO: 1170 - protein, 129 aa, Homo sapiens
MAHVQLVESGGGLVQAGASLRLSCAASGGTFSSYAMAWFRQAPGKEREFVAEDSWSNHRVWYSDSVKGRFTISRDNAKNTVYLQMNNLKPEDTAVYCCAAYRDYSGSTVDPPNQSEYDYWGQGTQVTVS

SEQ ID NO: 1171 - protein, 129 aa, Homo sapiens
MAHVQLVESGGGLVQAGASLRLSCAASGGTFSSYAMAWFRQAPGKEREFVAEDSWSNHRVWYSDSVKGRFTISRDNAKNTVYLQMNNLKPEDTAIYYCAAYRDYSGSTVDPPNQSEYDYWGQGTQVTVS

SEQ ID NO: 1172 - protein, 129 aa, Homo sapiens
MAHVQLVESGGGLVQAGASLRLSCAASGGTFSSYAMAWFRQAPGKEREFVAEDSWSNHRVWYSDSVKGRFIISRDNAKNTVYLQMNNLKPEDTAVYYCAAYRDYSGSTVDPPNQSEYDYWGQGTQVTVS

SEQ ID NO: 1173 - protein, 129 aa, Homo sapiens
MAHVQLVESGGGLVQAGASLRLSCAASGGTFSSYAMAWFRQAPGKEREFVAEDSWSNHRVWYLDSVKGRFTISRDNAKNTVYLQMNNLKPEDTAVYYCAAYRDYSGSTVDPPNQSEYDYWGQGTQVTVS

SEQ ID NO: 1174 - protein, 129 aa, Homo sapiens
MAHVQLVESGGGLVQAGASLRLSCAASGGTFSSYAMAWFRQAPGKECEFVAEDSWSNHRVWYSDSVKGRFTISRDNAKNTVYLQMNNLKPEDTAVYYCAAYRDYSGSTVDPPNQSEYDYWGQGTQVTVS

SEQ ID NO: 1175 - protein, 129 aa, Homo sapiens
MAHVQLVESGGGLVQAGASLRLSCAASGGTFSSYAMAWFLQAPGKEREFVAEDSWSNHRVWYSDSVKGRFTISRDNAKNTVYLQMNNLKPEDTAVYYCAAYRDYSGSTVDPPNQSEYDYWGQGTQVTVS

SEQ ID NO: 1176 - protein, 129 aa, Homo sapiens
MAHVQLVESGGGLVQAGASLRLSCAASGGTFSSYAMAWFHQAPGKEREFVAEDSWSNHRVWYSDSVKGRFTISRDNAKNTVYLQMNNLKPEDTAVYYCAAYRDYSGSTVDPPNQSEYDYWGQGTQVTVS

SEQ ID NO: 1177 - protein, 129 aa, Homo sapiens
MAHVQLVESGGGLVQAGASLRLSCAASGGTFSSYAMARFRQAPGKEREFVAEDSWSNHRVWYSDSVKGRFTISRDNAKNTVYLQMNNLKPEDTAVYYCAAYRDYSGSTVDPPNQSEYDYWGQGTQVTVS

SEQ ID NO: 1178 - protein, 129 aa, Homo sapiens
MAHVQLVESGGGLVQAGASLRLSCAASGDTFSSYAMAWFRQAPGKEREFVAEDSWSNHRVWYSDSVKGRFTISRDNAKNTVYLQMNNLKPEDTAVYYCAAYRDYSGSTVDPPNQSEYDYWGQGTQVTVS

SEQ ID NO: 1179 - protein, 127 aa, Homo sapiens
MAHVQLVESGGGLVQAEGSLRLSCTASGRTFSTYTMAWFRQAPGKEREFVAAISWSGTYYADSVKGRFTISRDNAKNTVYLQMNSLKPEDTAVYYCAAVIGSTVDSYSPSDPLEYDYWGQGTQVTVS

SEQ ID NO: 1180 - protein, 130 aa, Homo sapiens
MAHVQLVESGGGLVQAEGSLRLSCAASGRPFSSLDMGWFRQRPGKERDVVATINWTGDSTYYLDSVKGRFTISRDNAKNTVFLQMNSLKPEDTAVYYCAARGGGSSVDSEYDVGEFEYDYWGQGTQVTVS

SEQ ID NO: 1181 - protein, 129 aa, Homo sapiens
MAHVQLVESGGGLVKPGESLKLSCVASGETLSSYIMGWFRQAPGKEREFVAAVSWSGNQQDYADSVKGRFTISRDNAKNTVYLQMNSLKPEDTAVYYCAAVIGSTVDSYSPSDPLEYDYWGQGTQVTVS

SEQ ID NO: 1182 - protein, 130 aa, Homo sapiens
MAHVQLVESGGGLVHAGGSLRLSCAASGRPFSSLDMGWFRQRPGKERDVVATINWTGDSTYYLDSVKGRFTISRDNAKNTVFLQMNSLKPEDTAVYYCAARGGGSSVDSEYDVGEFEYDYWGQGTQVTVS

SEQ ID NO: 1183 - protein, 125 aa, Homo sapiens
MAHVQLVESGGGLVESGGSLRLSCTASGFTLDYYAIGWFRQAPGKEREGVSCISSSYSRTTYADSVKGRFTISRDKSKNMIYLQMNSLKPEDTAVYYCATRTLDGLECGGSHYDYFGQGTQVTVS

SEQ ID NO: 1184 - protein, 130 aa, Homo sapiens
MAHVQLVESGGGLMQAGGSLRLSCAASGRPFSSLDMGWFRQRPGKERDVVATINWTGDSTYYLDSVKGRFTISRDNAKNTVFLQMNSLKPEDTAVYYCAARGGGSSVDSEYDVGEFEYDYWGQGTQVTVS

SEQ ID NO: 1185 - protein, 130 aa, Homo sapiens
MAHVQLVESGGGLAQAGGSLRLSCAASGRPFSSLDMGWFRQRPGKERDVVATINWTGDSTYYLDSVKGRFTISRDNAKNTVFLQMNSLKPEDTAVYYCAARGGGSSVDSEYDVGEFEYDYWGQGTQVTVS

SEQ ID NO: 1186 - protein, 130 aa, Homo sapiens
MAHVQLVESGGGKVQAGDSLRLSCTFSGGAFSRHAVGWFRQAPGKDRDFVAGISWSGRSTDYVNSVKGRFTISRNDARNTVHLQMNSLKPEDTAVYYCAARGGGSSVDSEYDVGEFEYDYWGQGTQVTVS

SEQ ID NO: 1187 - protein, 127 aa, Homo sapiens
MAHVQLVESGGGFVQAGGSLRLSCTASGRTFSTYTMAWFRQAPGKEREFVAAISWSGAYYAESVKGRFTISRDNAKNTVYLQMNSLKPEDTAVYYCAAVIGSTVDSYSPSDPLEYDYWGQGTQVTVS

SEQ ID NO: 1188 - protein, 127 aa, Homo sapiens
MAHVQLVESGGDLVQPGGSVRVSCVSSGFILDYYAIGWFRQAPGKEREGVSCIDSVGRAYYVDSVKGRFTISRDNAKNTVYLQMNSLKPEDTAVYYCAADFGSSVDSTCLNNQQYDYWGQGTQVTVS

SEQ ID NO: 1189 - protein, 127 aa, Homo sapiens
MAHVQLVESGGDLVQPGGSLRLSCVGSDIALDYYAIGWFRQAPGKEREGIACITDSDGSTYYADSVKGRFTVSKDNAENTVYLQMNNLKPEDTAVYYCAADPRVRFYGGRCDDAYDYWGQGTQVTVS

SEQ ID NO: 1190 - protein, 130 aa, Homo sapiens
MAHVQLVESGGDLVQAGGSLRLSCAASGRPFSSLDMGWFRQAPGKEREFVAAITWTGGSTYYTDSVKGRFTISRDNAKNTVYLQMNSLKPEDTAVYYCAARGGGTSVDNDYDVGEFEYDYWGQGTQVTVS

SEQ ID NO: 1191 - protein, 129 aa, Homo sapiens
MAHVQLVESGGDLVQAGASLRLSCAASGGTFSSYAMAWFRQAPGKEREFVAEDSWSNHRVWYSDSVKGRFTISRDNAKNTVYLQMNNLKPEDTAVYYCAAYRDYSGSTVDPPNQSEYDYWGQGTQVTVS

SEQ ID NO: 1192 - protein, 130 aa, Homo sapiens
MAEVQLVESGVGLVQAGGSLRLSCAASGRPFSSLDMGWFRQAPGKEREFVATISWTGGSTYYADSVKGRFTISRDNAKNTVYLQMNSLKPEDTAVYYCAARGGGTSVDSDYDVEEFEYDYWGQGTQVTVS

SEQ ID NO: 1193 - protein, 130 aa, Homo sapiens
MAEVQLVESGGVLVQAGGSLRLSCAASGRPFSSLDMGWFRQRPGKERDVVATINWTGDSTYYLDSVKGRFTISRDNAKNTVFLQMNSLKPEDTAVYYCAARGGGSSVDSEYDVGEFEYDYWGQGTQVTVS

SEQ ID NO: 1194 - protein, 120 aa, Homo sapiens
MAEVQLVESGGSVRVSCVSSGFILDYYAIGWFRQAPGKEREGVSCIDSVGRAYYVDSVKGRFTISRDNAKNTVYLQMNSLKPEDTAVYYCAADFGSSVDSTCLNNQQYDYWGQGTQVTVS

SEQ ID NO: 1195 - protein, 118 aa, Homo sapiens
MAEVQLVESGGSLRLSCTASDLTLDYYAIGWFRQAPGKEREGVSCISSSYGRTTYADSVKGRFTISRDKAKNMVYLQMNSLKPEDTAVYYCATRTLDGLECGGSHYDYFGQGTQVTVS

SEQ ID NO: 1196 - protein, 129 aa, Homo sapiens
MAEVQLVESGGRLVQAGGSLRLSCAASGRTFTHLNMGWFRQAPGKEREFTAHINWSGGSTNYADSVKGRFTISRDNAKNTVYLQMNSLKPEDTAVYYCAATLGDSVDLDSDADPRGYDYWGQGTQVTVS

SEQ ID NO: 1197 - protein, 129 aa, Homo sapiens
MAEVQLVESGGRLVQAGGSLRLSCAASGRTFTHLNMGWFHQAPGKEREFTAHINWSGGSTNYADSVKGRFTISRDNAKNTVYLQMNSLKPEDTAVYYCAATLGDSVDLDSDADPRGYDYWGQGTQVTVS

SEQ ID NO: 1198 - protein, 129 aa, Homo sapiens
MAEVQLVESGGRLVQAGDSLKLSCAASGRTFSTYTMGWFRQAPGKEREFVAGTSPSGDNRNYGDSVKGRFSISRDNARNTMYLQMNSLKPEDTAVYFCAAFRGSCVDYGCDFRVSQYDYWGQGTQVTVS

SEQ ID NO: 1199 - protein, 126 aa, Homo sapiens
MAEVQLVESGGKLVQAGGSLRLSCAVSGVSFRNMGWFRQAPGKEREFVAAISWSGDSTVYADSVKGRVTISRDNAKNTVHLEMNSLKPEDTAVYYCAADGRFRAGRIGTSLGLYHYWGQGTQVTVS

SEQ ID NO: 1200 - protein, 132 aa, Homo sapiens
MAEVQLVESGGKLVQAGGSLRLSCAASGRTFSSYTWGWFRQVPGKEREFVAAIRWSDNTLYTNYADSVKGRFTISRDNAKNTMYLQMNSLKPEDTAVYYCAARGGGSSVDSEYDVGEFEYDYWGQGTQVTVS

SEQ ID NO: 1201 - protein, 130 aa, Homo sapiens
MAEVQLVESGGGVVQAGGSLRLSCAASGRPFSSLDMGWFRQRPGKERDVVATINWTGDSTYYLDSVKGRFTISRDNAKNTVFLQMNSLKPEDTAVYYCAARGGGSSVDSEYDVGEFEYDYWGQGTQVTVS

SEQ ID NO: 1202 - protein, 127 aa, Homo sapiens
MAEVQLVESGGGSVQTGGSLRLSCTASGRTFSTYTMAWFRQAPGKEREFVAAISWSGAYYADSVTGRFTISRDNAKNTVYLQMNSLKPEDTAVYYCAAVIGSTVDSYRPGDPLEYDYWGQGTQVTVS

SEQ ID NO: 1203 - protein, 127 aa, Homo sapiens
MAEVQLVESGGGSVQAGGSLRLSCTASGRTFSTYTMAWFRQAPGKEREFVAAITWSTTYYADSVKGRFTISRDNAKNTMYLQMNNLKPEDTAVYICAAVIGSTVDSYSPSDPLEYDYWGQGTQVTVS

SEQ ID NO: 1204 - protein, 127 aa, Homo sapiens
MAEVQLVESGGGSVQAGGSLRLSCTASGRTFSTYTMAWFRQAPGKEREFVAAISWSGAYYVDSVTGRFTISRDNAKNTVYLQMNSLKPEDTAVYYCAAVIGSTVDSYRPGDPLEYDYWGQGTQVTVS

SEQ ID NO: 1205 - protein, 127 aa, Homo sapiens
MAEVQLVESGGGSVQAGGSLRLSCTASGRTFSTYTMAWFRQAPGKEREFVAAISWSGAYYTDSVTGRFTISRDNAKNTVYLQMNSLKPEDTAVYYCAAVIGSTVDSYRPGDPLEYDYWGQGTQVTVS

SEQ ID NO: 1206 - protein, 127 aa, Homo sapiens
MAEVQLVESGGGSVQAGGSLRLSCTASGRTFSTYTMAWFRQAPGKEREFVAAISWSGAYYADSVTGRFTISRDNAKNTVYLQMNSLKPEDTAVYYCAAVIGSTVDSYRPGDPLEYDYWGQGTQVTVS

SEQ ID NO: 1207 - protein, 127 aa, Homo sapiens
MAEVQLVESGGGSVQAGGSLRLSCTASGRTFSTYTMAWFRQAPGKEREFVAAISWSGAYYADSVTGRFTISRDNAKNTVYLQMNSLKPEDTAVYYCAAVIGSTVDSYRPGDHLEYDYWGQGTQVTVS

SEQ ID NO: 1208 - protein, 127 aa, Homo sapiens
MAEVQLVESGGGSVQAGGSLRLSCTASGRTFSTYTMAWFRQAPGKEREFVAAISWSGAYYADSVTGRFIISRDNAKNTVYLQMNSLKPEDTAVYYCAAVIGSTVDSYRPGDPLEYDYWGQGTQVTVS

SEQ ID NO: 1209 - protein, 127 aa, Homo sapiens
MAEVQLVESGGGSVQAGGSLRLSCTASGRTFSTYTMAWFRQAPGKEREFVAAISWSGAYYADSVTGRFAISRDNAKNTVYLQMNSLKPEDTAVYYCAAVIGSTVDSYRPGDPLEYDYWGQGTQVTVS

SEQ ID NO: 1210 - protein, 127 aa, Homo sapiens
MAEVQLVESGGGSVQAGGSLRLSCTASGRTFSTYTMAWFRQAPGKEHEFVAAISWSGAYYADSVTGRFTISRDNAKNTVYLQMNSLKPEDTAVYYCAAVIGSTVDSYRPGDPLEYDYWGQGTQVTVS

SEQ ID NO: 1211 - protein, 127 aa, Homo sapiens
MAEVQLVESGGGSVQAGGSLRLSCTASGRTFSTYTIAWFRQAPGKEREFVAAISWSGAYYADSVTGRFTISRDNAKNTVYLQMNSLKPEDTAVYYCAAVIGSTVDSYRPGDPLEYDYWGQGTQVTVS

SEQ ID NO: 1212 - protein, 132 aa, Homo sapiens
MAEVQLVESGGGSVQAGGSLRLSCAASGRTFSSLRMAWFRQAPGKEREFVAENWWNGQGGQGVWYVDSVKGRFTISRDNAKNTLYLQMNNLKPEDTAVYYCAAHRDDSGSTVDPPNQSDYDYWGQGTQVTVS

SEQ ID NO: 1213 - protein, 130 aa, Homo sapiens
MAEVQLVESGGGSVQAGGSLRLSCAASGRPFSSLDMGWFRQRPGKERDVVATINWTGDSTYYLDSVKGRFTISRDNAKNTVFLQMNSLKPEDTAVYYCAARGGGSSVDSEYDVGEFEYDYWGQGTQVTVS

SEQ ID NO: 1214 - protein, 130 aa, Homo sapiens
MAEVQLVESGGGSVQAGGSLRLSCAASGRPFSSLDMGWFRQAPGKEREFVATISWTGGSTYYADSVKGRFTISRDNAKNTVYLQMNSLKPEDTAVYYCAARGGGTSVDSDYDVEEFEYDYWGQGTQVTVS

SEQ ID NO: 1215 - protein, 130 aa, Homo sapiens
MAEVQLVESGGGSVQAGDSLRLSCAASGRPFSSLDMGWFRQRPGKERDVVATINWTGDSTYYLDSVKGRFTISRDNAKNTVFLQMNSLKPEDTAVYYCAARGGGSSVDSEYDVGEFEYDYWGQGTQVTVS

SEQ ID NO: 1216 - protein, 129 aa, Homo sapiens
MAEVQLVESGGGSVQAGASLRLSCAASGGTFSSYAMAWFRQAPGKEREFVAEDSWSNHRVWYSDSVKGRFTISRDNAKNTVYLQMNNLKPEDTAVYYCAAYRDYSGSTVDPPNQSEYDYWGQGTQVTVS

SEQ ID NO: 1217 - protein, 128 aa, Homo sapiens
MAEVQLVESGGGPVQAGGSLRLSCAASGRTFSTYVMAWFRQAPGKEREFVAAISWNGSTYYADSVKGRFTISRDNAKNTVYLQMNSLSPEDTAVYYCAAAIGSTVDSYSPSDPLEYDYWGQGTQVTVS

SEQ ID NO: 1218 - protein, 129 aa, Homo sapiens
MAEVQLVESGGGPVQAGGSLRLSCAASGRTFSTYVMAWFRQAPGKEREFVAAISWNGGSTYYADSVKGRFTISRDNTKNTVYLQMNSLSPEDTAVYYCAAAIGSTVDSYSPSDPLEYDYWGQGTQVTVS

SEQ ID NO: 1219 - protein, 129 aa, Homo sapiens
MAEVQLVESGGGLVRAGASLRLSCAASGGTFSSYAMAWFRQAPGKEREFVAEDSWSNHRVWYSDSVKGRFTISRDNAKNTVYLQMNNLKPEDTAVYYCAAYRDYSGSTVDPPNQSEYDYWGQGTQVTVS

SEQ ID NO: 1220 - protein, 129 aa, Homo sapiens
MAEVQLVESGGGLVQVGGSLRLSCAASGRTFSMYTMGWFHQAPGKEREFVAEISGTGGNTGYADSVKGRFTISRDNAKNTVYQQMNSLKPEDTAVYYCAAVIGSPTDSSDYRSSLDYDYWGQGTQVTVS

SEQ ID NO: 1221 - protein, 130 aa, Homo sapiens
MAEVQLVESGGGLVQVGGSLRLSCAASGRPFSSLDMGWFRQRPGKERDVVATINWTGDSTYYLDSVKGRFTISRDNAKNTVFLQMNSLKPEDTAVYYCAARGGGSSVDSEYDVGEFEYDYWGQGTQVTVS

SEQ ID NO: 1222 - protein, 127 aa, Homo sapiens
MAEVQLVESGGGLVQTGGSLRLSCTASGRTFSTYTMAWFRQAPGKEREFVAAISWSGTYYADSVKGRFTISRDNAKNTVYLQMNSLKPEDTAVYYCAAVIGSTVDSYSPSDPLEYDYWGQGTQVTVS

SEQ ID NO: 1223 - protein, 127 aa, Homo sapiens
MAEVQLVESGGGLVQTGGSLRLSCTASGRTFSTYTMAWFRQAPGKEREFVAAISWSGAYYAESVKGRFTISRDNAKNTVYLQMNSLKPEDTAVYYCAAVIGSTVDSYSPSDPLEYDYWGQGTQVTVS

SEQ ID NO: 1224 - protein, 126 aa, Homo sapiens
MAEVQLVESGGGLVQTGGSLRLSCAASTRTFSDYTMGWFRRAPGKEREFVATISTGGGSRKYGDSVVGRFTISRDNAKNMVYLQMNSLKPEDTAVYYCAASHRGYYSGSYSREYDFWGQGTQVTVS

SEQ ID NO: 1225 - protein, 126 aa, Homo sapiens
MAEVQLVESGGGLVQTGGSLRLSCAASTRTFSDYTMGWFRRAPGKEREFVATISTGGGSRKYADSVTGRFTISRDNAKNMVYLQMNSLKPEDTAVYYCAASLRGYYSGSYSREYDLWGQGTQVTVS

SEQ ID NO: 1226 - protein, 130 aa, Homo sapiens
MAEVQLVESGGGLVQTGGSLRLSCAASGRPFSSLDMGWFRQRPGKERDVVATINWTGDSTYYLDSVKGRFTISRDNAKNTVFLQMNSLKPEDTAVYYCAARGGGSSVDSEYDVGEFEYDYWGQGTQVTVS

SEQ ID NO: 1227 - protein, 130 aa, Homo sapiens
MAEVQLVESGGGLVQTGGSLRLSCAASGRPFSSLDMGWFRQAPGKEREFVATISWTGGSTYYADSVKGRFTISRDNAKNTVYLQMNSLKPEDTAVYYCAARGGGTSVDSDYDVEEFEYDYWGQGTQVTVS

SEQ ID NO: 1228 - protein, 126 aa, Homo sapiens
MAEVQLVESGGGLVQTGDSLRLSCAASTRTFSDYTMGWFRRAPGKEREFVATISTGGGSRKYGDSVVGRFTISRDNAKNMVYLHMNSLKPEDTAVYYCAASLRGYYSGSYSREYDLWGQGTQVTVS

SEQ ID NO: 1229 - protein, 129 aa, Homo sapiens
MAEVQLVESGGGLVQTGASLRLSCAASGGTFSSYAMAWFRQAPGKEREFVAEDSWSNHRVWYSDSVKGRFTISRDNAKNTVYLQMNNLKPEDTAVYYCAAYRDYSGSTVDPPNQSEYDYWGQGTQVTVS

SEQ ID NO: 1230 - protein, 125 aa, Homo sapiens
MAEVQLVESGGGLVQSGGSLRLSCTASGFTLDYYAIGWFRQAPGKEREGVSCISSSYGRTTYADSVKGRFTISRDKSKNMIYLQMNSLKPEDTAVYYCATRTLDGLECGGSHYDYFGQGTQVTVS

SEQ ID NO: 1231 - protein, 125 aa, Homo sapiens
MAEVQLVESGGGLVQSGGSLRLSCTASGFTLDYYAIGWFRQAPGKEREGVSCISSSYGRTTYADSVKGRFTISRDKSKNMIYLQMNSLKPEDTAVYYCATRTLDGLECGGSHYDYCGQGTQVTVS

SEQ ID NO: 1232 - protein, 127 aa, Homo sapiens
MAEVQLVESGGGLVQPGGSVRVSCVSSGFILDYYVIGWFRQAPGKEREGVSCIDSVGRAYYVDSVKGRFTISRDNAKNTVYLQMNSLKPEDTAVYYCAADFGSSVDSTCLNNQQYDYWGQGTQVTVS

SEQ ID NO: 1233 - protein, 127 aa, Homo sapiens
MAEVQLVESGGGLVQPGGSVRVSCVSSGFILDYYAIGWLRQAPGKEREGVSCIDSVGRAYYVDSVKGRFTISRDNAKNTVYLQMNSLKPEDTAVYYCAADFGSSVDSTCLNNQQYDYWGQGTQVTVS

SEQ ID NO: 1234 - protein, 127 aa, Homo sapiens
MAEVQLVESGGGLVQPGGSVRVSCVSSGFILDYYAIGWFRQAPGKEREGVSCIDSVGRAYYVDSVNGRFTISRDNAKNTVYLQMNSLKPEDTAVYYCAADFGSSVDSTCLNNQQYDYWGQGTQVTVS

SEQ ID NO: 1235 - protein, 127 aa, Homo sapiens
MAEVQLVESGGGLVQPGGSVRVSCVSSGFILDYYAIGWFRQAPGKEREGVSCIDSVGRAYYVDSVKGRFTISRDNVKNTVYLQMNSLKPEDTAVYYCAADFGSSVDSTCLNNQQYDYWGQGTQVTVS

SEQ ID NO: 1236 - protein, 127 aa, Homo sapiens
MAEVQLVESGGGLVQPGGSVRVSCVSSGFILDYYAIGWFRQAPGKEREGVSCIDSVGRAYYVDSVKGRFTISRDNTKNTVYLQMNSLKPEDTAVYYCAADFGSSVDSTCLNNQQYDYWGQGTQVTVS

SEQ ID NO: 1237 - protein, 127 aa, Homo sapiens
MAEVQLVESGGGLVQPGGSVRVSCVSSGFILDYYAIGWFRQAPGKEREGVSCIDSVGRAYYVDSVKGRFTISRDNDKNTVYLQMNSLKPEDTAVYYCAADFGSSVDSTCLNNQQYDYWGQGTQVTVS

SEQ ID NO: 1238 - protein, 127 aa, Homo sapiens
MAEVQLVESGGGLVQPGGSVRVSCVSSGFILDYYAIGWFRQAPGKEREGVSCIDSVGRAYYVDSVKGRFTISRDNAKNTVYLQMNSLKPEDTVVYYCAADFGSSVDSTCLNNQQYDYWGQGTQVTVS

SEQ ID NO: 1239 - protein, 127 aa, Homo sapiens
MAEVQLVESGGGLVQPGGSVRVSCVSSGFILDYYAIGWFRQAPGKEREGVSCIDSVGRAYYVDSVKGRFTISRDNAKNTVYLQMNSLKPEDTTVYYCAADFGSSVDSTCLNNQQYDYWGQGTQVTVS

SEQ ID NO: 1240 - protein, 127 aa, Homo sapiens
MAEVQLVESGGGLVQPGGSVRVSCVSSGFILDYYAIGWFRQAPGKEREGVSCIDSVGRAYYVDSVKGRFTISRDNAKNTVYLQMNSLKPEDTAVYYCAADFGSSVDSTCLNNQQYNYWGQGTQVTVS

SEQ ID NO: 1241 - protein, 127 aa, Homo sapiens
MAEVQLVESGGGLVQPGGSVRVSCVSSGFILDYYAIGWFRQAPGKEREGVSCIDSVGRAYYVDSVKGRFTISRDNAKNTVYLQMNSLKPEDTAVYYCAADFGSSVDSTCLNNQQYDYWGQGTQVTVS

SEQ ID NO: 1242 - protein, 126 aa, Homo sapiens
MAEVQLVESGGGLVQPGGSVRVSCVSSGFILDYYAIGWFRQAPGKEREGVSCIDSVGRAYYVDSVKGRFTISRDNAKNTVYLQMNSLKPEDTAVYYCAADFGSSVDSTCLNNQQYDYWGQGPRSPS

SEQ ID NO: 1243 - protein, 127 aa, Homo sapiens
MAEVQLVESGGGLVQPGGSVRVSCVSSGFILDYYAIGWFRQAPGKEREGVSCIDSVGRAYYVDSVKGRFTISRDNAKNTVYLQMNSLKPEDTAVYYCAADFGSSVDSTCLNNQQYDYWGHGTQVTVS

SEQ ID NO: 1244 - protein, 127 aa, Homo sapiens
MAEVQLVESGGGLVQPGGSVRVSCVSSGFILDYYAIGWFRQAPGKEREGVSCIDSVGRAYYVDSVKGRFTISRDNAKNTVYLQMNSLKPEDTAVYYCAADFGSSVDSTCLNNQQYDYGGQGTQVTVS

SEQ ID NO: 1245 - protein, 127 aa, Homo sapiens
MAEVQLVESGGGLVQPGGSVRVSCVSSGFILDYYAIGWFRQAPGKEREGVSCIDSVGRAYYVDSVKGRFTISRDNAKNTVYLQMNSLKPEDTAVYYCAADFGSSVDSTCLNNQQYDDWGQGTQVTVS

SEQ ID NO: 1246 - protein, 127 aa, Homo sapiens
MAEVQLVESGGGLVQPGGSVRVSCVSSGFILDYYAIGWFRQAPGKEREGVSCIDSVGRAYYVDSVKGRFIISRDNAKNTVYLQMNSLKPEDTAVYYCAADFGSSVDSTCLNNQQYDYWGQGTQVTVS

SEQ ID NO: 1247 - protein, 127 aa, Homo sapiens
MAEVQLVESGGGLVQPGGSVRVSCVSSGFILDYYAIGWFRQAPGKEREGVSCIDSVGRAYYVDSVKGRFAISRDNAKNTVYLQMNSLKPEDTAVYYCAADFGSSVDSTCLNNQQYDYWGQGTQVTVS

SEQ ID NO: 1248 - protein, 127 aa, Homo sapiens
MAEVQLVESGGGLVQPGGSVRVSCVSSGFILDYYAIGWFRQAPGKEREGVSCIDSVGRAYYVDSVKGQFTISRDNAKNTVYLQMNSLKPEDTAVYYCAADFGSSVDSTCLNNQQYDYWGQGTQVTVS

SEQ ID NO: 1249 - protein, 127 aa, Homo sapiens
MAEVQLVESGGGLVQPGGSVRVSCVSSGFILDYYAIGWFRQAPGKEREGVSCIDSVGRAYYVDSVKDRFTISRDNAKNTVYLQMNSLKPEDTAVYYCAADFGSSVDSTCLNNQQYDYWGQGTQVTVS

SEQ ID NO: 1250 - protein, 127 aa, Homo sapiens
MAEVQLVESGGGLVQPGGSVRVSCVSSGFILDYYAIGWFRQAPGKEREGVSCIDSVGRAYYVDSMKGRFTISRDNAKNTVYLQMNSLKPEDTAVYYCAADFGSSVDSTCLNNQQYDYWGQGTQVTVS

SEQ ID NO: 1251 - protein, 128 aa, Homo sapiens
MAEVQLVESGGGLVQPGGSLRLSCVSSGFIFDYYAIGWFRQAPGKEREGVSCISSVGRAYYIDSVKGRFTISRDNAKNTVYLQMNSLKPEDTAVYYCAADFGSSVDSTCLSKEQRFDYWGQGTQVTVS

SEQ ID NO: 1252 - protein, 122 aa, Homo sapiens
MAEVQLVESGGGLVQPGGSLRLSCTASGYPISTYAMGWVRQAPGKGPEWVATIYYSGVTHYRNSVKGRFTISRDNAKNTLHLQMNSLKPEDTAVYYCAKGVNGTYLRVEAEYRGQGTQVTVS

SEQ ID NO: 1253 - protein, 127 aa, Homo sapiens
MAEVQLVESGGGLVQPGGSLRLSCTASGRTFSTYTMAWFRQAPGKEREFVAAITWSGTYYADSVKGRFTISRDNAKNTMYLQMNSLKPEDTAVYICAAVIGSTVDSYSPSDPLEYDYWGQGTQVTVS

SEQ ID NO: 1254 - protein, 127 aa, Homo sapiens
MAEVQLVESGGGLVQPGGSLRLSCTASGRTFSTYTMAWFRQAPGKEREFVAAISWSGTYYADSVKGRFTISRDNAKNTVYLQMNSLKPEDTAVYYCAAVIGSTVDSYSPSDPLEYDYWGQGTQVTVS

SEQ ID NO: 1255 - protein, 127 aa, Homo sapiens
MAEVQLVESGGGLVQPGGSLRLSCTASGRTFSTYTMAWFRQAPGKEREFVAAISWSGAYYAESVKGRFTISRDNAKNTVYLQMNSLKPEDTAVYYCAAVIGSTVDSYSPSDPLEYDYWGQGTQVTVS

SEQ ID NO: 1256 - protein, 126 aa, Homo sapiens
MAEVQLVESGGGLVQPGGSLRLSCTASGFTLKYYAIGWFRQAPGKEREGVSCISSFSGRTFTYSDSAKGRFTISRDNDKNTVYLQMNSLKPEDTAVYYCATRPLDGLECGGSAYDYYGPGTQVTVS

SEQ ID NO: 1257 - protein, 129 aa, Homo sapiens
MAEVQLVESGGGLVQPGGSLRLSCKASGFDFEYYTIGWFRQAPGKEREGVSCINRGDGATYYRDSVKGRFTISRDNAKKTMYLEMNNLKPEDTAVYYCATADSGWGCYGHRIQKNEFDHFGQGTQVTVS

SEQ ID NO: 1258 - protein, 127 aa, Homo sapiens
MAEVQLVESGGGLVQPGGSLRLSCAASGRTFSTYTLGWFRQAPGKEREFVGAITWSGGTTADSVKGRFSISRDNAKNTVYLQMNSLKPEDTAVYYCAAVIGSTVDSYDPSDPIEYDYWGQGTQVTVS

SEQ ID NO: 1259 - protein, 126 aa, Homo sapiens
MAEVQLVESGGGLVQPGGSLRLSCAASGRTFRSYTMGWFRQAPGKEREFVAAISWSGGSTYYADSVKGRFTISRDNAKTTVYLQMNSLKPEDTAVYYCAASKYYSGNYYSQVRYDYWGQGTQVTVS

SEQ ID NO: 1260 - protein, 130 aa, Homo sapiens
MAEVQLVESGGGLVQPGGSLRLSCAASGRPFSSLDMGWFRQRPGKERDVVATINWTGDSTYYLDSVKGRFTISRDNAKNTVFLQMNSLKPEDTAVYYCAARGGGSSVDSEYDVGEFEYDYWGQGTQVTVS

SEQ ID NO: 1261 - protein, 130 aa, Homo sapiens
MAEVQLVESGGGLVQPGGSLRLSCAASGRPFSSLDMGWFRQAPGKEREFVAAITWTGGSTYYTDSVKGRFTISRDNAKNTVYLQMNSLKPEDTAVYYCAARGGGTSVDNDYDVGEFEYDYWGQGTQVTVS

SEQ ID NO: 1262 - protein, 130 aa, Homo sapiens
MAEVQLVESGGGLVQPGGSLRLSCAASGRPFNMYDMGWFRQALGKEREFVATVSWTGSSTNYADSVKGRFTISRDNAKNTVYLEMNSLKPEDTAVYYCAARGGGTSVDSDYDVGEFEYDYWGQGTQVTVS

SEQ ID NO: 1263 - protein, 127 aa, Homo sapiens
MAEVQLVESGGGLVQPGGSLRLSCAASGRAFDRYTMAWFRQGPGKEREFVATVGWNDNSIYYADSVKGRFTISRDNAKNTVYLQMNSLKPEDTAVYYCAATFGSPVDTPLDRGAYDFWGQGTQVTVS

SEQ ID NO: 1264 - protein, 129 aa, Homo sapiens
MAEVQLVESGGGLVQPGGSLRLSCAASGGTFSSYAMAWFRQAPGKEREFVAEDSWSNHRVWYSDSVKGRFTISRDNAKNTVYLQMNNLKPEDTAVYYCAAYRDYSGSTVDPPNQSEYDYWGQGTQVTVS

SEQ ID NO: 1265 - protein, 132 aa, Homo sapiens
MAEVQLVESGGGLVQPGGSLRLSCAASGFTSDYYVISWFRQAPGKEREGVSCISSSDTYYADSVKGRFTISRDNAKNTVYLQMNSLKPEDTAVYYCATAAIWDPSGLAVCGSSWYRRGWWDYWGQGTQVTVS

SEQ ID NO: 1266 - protein, 127 aa, Homo sapiens
MAEVQLVESGGGLVQPGGSLRLSCAASGFTLDYYIIAWFRQAPGKEREGVSCIHSSDGSTYYADSVKGRFTISRDNAKNTVYLQMNSLKPEDTAVYYCATHEEMDSDLCHHISEYDYWGQGTQVTVS

SEQ ID NO: 1267 - protein, 130 aa, Homo sapiens
MAEVQLVESGGGLVQPGGSLRLSCAASGFTLDYYAIGWFRQRPGKERDVVATINWTGDSTYYLDSVKGRFTISRDNAKNTVFLQMNSLKPEDTAVYYCAARGGGSSVDSEYDVGEFEYDYWGQGTQVTVS

SEQ ID NO: 1268 - protein, 130 aa, Homo sapiens
MAEVQLVESGGGLVQPGGSLRLSCAASGFTLDYYAIGWFRQAPGKEREGVSCISSSDGSTYYADSVKGRFTISRDNAKNTVYLQMNSLKPEDTAVYYCAARGGGTSVDSDYDVEEFEYDYWGQGTQVTVS

SEQ ID NO: 1269 - protein, 130 aa, Homo sapiens
MAEVQLVESGGGLVQPGGSLRLSCAASGFTLDYYAIGWFRQAPGKEREGVSCISSSDGSTYYADSVKGRFTISRDNAKNTVYLQMNSLKPEDTAVYYCAARGGGSSVDSEYDVGEFEYDYWGQGTQVTVS

SEQ ID NO: 1270 - protein, 130 aa, Homo sapiens
MAEVQLVESGGGLVQPGGSLRLSCAASGFTLDYYAIGWFRQAPGKEREGVSCISSSDGSTYYADSVKGRFTISRDNAKNTVFLQMNSLKPEDTAVYYCAARGGGSSVDSEYDVGEFEYDYWGQGTQVTVS

SEQ ID NO: 1271 - protein, 127 aa, Homo sapiens
MAEVQLVESGGGLVQPGGSLRLSCAASGFTLDDYAIGWFRQAPGKEREGVSCISTHGSTYYADSVKGRFTISRDNVKNTLYLQMNSLKPEDTALYYCAASYYSDYEVAVCRSDALDAWGQGTQVTVS

SEQ ID NO: 1272 - protein, 127 aa, Homo sapiens
MAEVQLVESGGGLVQPGGSLRLSCAASGFTLDDYAIGWFRQAPGKEREGVSCISSHGSTYYADSVKGRFTISRDNVKNTLYLQMNSLKPEDTALYYCAASYYSDYEVAVCRSDALDAWGQGTQVTVS

SEQ ID NO: 1273 - protein, 123 aa, Homo sapiens
MAEVQLVESGGGLVQPGGSLRLSCAASGFTFSTYAMGWVRQAPGKGPEWVATIYSKGDTTHYANSAKGRFTISRDNARNTLYLQMNSLKPEDTAVYYCAKGISDSYLRVESNYRGQGTQVTVS

SEQ ID NO: 1274 - protein, 127 aa, Homo sapiens
MAEVQLVESGGGLVQPGASLRLSCTASGRTFSTYTMAWFRQAPGKEREFVAAISWSGTYYADSVKGRFTISRDNAKNTVYLQMNSLKPEDTAVYYCAAVIGSTVDSYSPSDPLEYDYWGQGTQVTVS

SEQ ID NO: 1275 - protein, 127 aa, Homo sapiens
MAEVQLVESGGGLVQAWGSLRLSCTASGRTFSTYTMAWFRQAPGKERDFVAAISWSGAYYADSVKGRFTISRDNAKNTVYLQMNSLKPEDTAVYYCAAVIGSTVDSYSPSDPLDYDYWGQGTQVTVS

SEQ ID NO: 1276 - protein, 124 aa, Homo sapiens
MAEVQLVESGGGLVQAWGSLRLSCAASGSIGSINIMGWYRQAPGKQRELVASITSGGATNYADSVKGRFTISRDNAKNTVYLQMNSLKPEDTAVYYCNLDRGTHLGDSFERDDYWGRGTQVTVS

SEQ ID NO: 1277 - protein, 130 aa, Homo sapiens
MAEVQLVESGGGLVQAWGSLRLSCAASGRPFSSLDMGWFRQRPGKERDVVATINWTGDSTYYLDSVKGRFTISRDNAKNTVFLQMNSLKPEDTAVYYCAARGGGSSVDSEYDVGEFEYDYWGQGTQVTVS

SEQ ID NO: 1278 - protein, 127 aa, Homo sapiens
MAEVQLVESGGGLVQAVGSLRLSCTASGRTFSTYTMAWFRQAPGKEREFVAAISWSGTYYADSVKGRFTISRDNAKNTVYLQMNSLKPEDTAVYYCAAVIGSTVDSYSPSDPLEYDYWGQGTQVTVS

SEQ ID NO: 1279 - protein, 129 aa, Homo sapiens
MAEVQLVESGGGLVQAVASLRLSCAASGGTFSSYAMAWFRQAPGKEREFVAEDSWSNHRVWYSDSVKGRFTISRDNAKNTVYLQMNNLKPEDTAVYYCAAYRDYSGSTVDPPNQSEYDYWGQGTQVTVS

SEQ ID NO: 1280 - protein, 127 aa, Homo sapiens
MAEVQLVESGGGLVQARGSLRLSCTASGRTFSTYTMAWFRQAPGKERDFVAAISWSGVYYADSVKGRFTISRDNVKNTMYLQMNNLKPEDTAVYYCAAVIGSTVDSYSPSDPLEYDYWGQGTQVTVS

SEQ ID NO: 1281 - protein, 129 aa, Homo sapiens
MAEVQLVESGGGLVQARASLRLSCAASGGTFSSYAMAWFRQAPGKEREFVAEDSWSNHRVWYSDSVKGRFTISRDNAKNTVYLQMNNLKPEDTAVYYCAAYRDYSGSTVDPPNQSEYDYWGQGTQVTVS

SEQ ID NO: 1282 - protein, 127 aa, Homo sapiens
MAEVQLVESGGGLVQAGVSLRLSCTASGRTFSTYTMAWFRQAPGKEREFVAAISWSGTYYADSVKGRFTISRDNAKNTVYLQMNSLKPEDTAVYYCAAVIGSTVDSYSPSDPLEYDYWGQGTQVTVS

SEQ ID NO: 1283 - protein, 130 aa, Homo sapiens
MAEVQLVESGGGLVQAGSSLRLSCAASGRPFSSLDMGWFRQRPGKERDVVATINWTGDSTYYLDSVKGRFTISRDNAKNTVFLQMNSLKPEDTAVYYCAARGGGSSVDSEYDVGEFEYDYWGQGTQVTVS

SEQ ID NO: 1284 - protein, 130 aa, Homo sapiens
MAEVQLVESGGGLVQAGRSLRLSCAASGRPFSSLDMGWFRQRPGKERDVVATINWTGDSTYYLDSVKGRFTISRDNAKNTVFLQMNSLKPEDTAVYYCAARGGGSSVDSEYDVGEFEYDYWGQGTQVTVS

SEQ ID NO: 1285 - protein, 130 aa, Homo sapiens
MAEVQLVESGGGLVQAGGSPRLSCAASGRPFSSLDMGWFRQRPGKERDVVATINWTGDSTYYLDSVKGRFTISRDNAKNTVFLQMNSLKPEDTAVYYCAARGGGSSVDSEYDVGEFEYDYWGQGTQVTVS

SEQ ID NO: 1286 - protein, 130 aa, Homo sapiens
MAEVQLVESGGGLVQAGGSPRLSCAASGRPFSSLDMGWFRQAPGKEREFVATISWTGGSTYYADSVKGRFTISRDNAKNTVYLQMNSLKPEDTAVYYCAARGGGTSVDSDYDVEEFEYDYWGQGTQVTVS

SEQ ID NO: 1287 - protein, 130 aa, Homo sapiens
MAEVQLVESGGGLVQAGGSPRLSCAASGRPFSSLDMGWFRQAPGKEREFVAAITWTGGSTYYTDSVKGRFTISRDNAKNTVYLQMNSLKPEDTAVYYCAARGGGTSVDNDYDVGEFEYDYWGQGTQVTVS

SEQ ID NO: 1288 - protein, 130 aa, Homo sapiens
MAEVQLVESGGGLVQAGGSPRLSCAASGRPFNMYDMGWFRQALGKEREFVATVSWTGSSTNYADSVKGRFTISRDNAKNTVYLEMNSLKPEDTAVYYCAARGGGTSVDSDYDVGEFEYDYWGQGTQVTVS

SEQ ID NO: 1289 - protein, 130 aa, Homo sapiens
MAEVQLVESGGGLVQAGGSLTLSCAASGRPFSSLDMGWFRQRPGKERDVVATINWTGDSTYYLDSVKGRFTISRDNAKNTVFLQMNSLKPEDTAVYYCAARGGGSSVDSEYDVGEFEYDYWGQGTQVTVS

SEQ ID NO: 1290 - protein, 130 aa, Homo sapiens
MAEVQLVESGGGLVQAGGSLSLSCAASGRPFSSLDMGWFRQRPGKERDVVATINWTGDSTYYLDSVKGRFTISRDNAKNTVFLQMNSLKPEDTAVYYCAARGGGSSVDSEYDVGEFEYDYWGQGTQVTVS

SEQ ID NO: 1291 - protein, 130 aa, Homo sapiens
MAEVQLVESGGGLVQAGGSLRLSYAASGRPFSSLDMGWFRQRPGKERDVVATINWTGDSTYYLDSVKGRFTISRDNAKNTVFLQMNSLKPEDTAVYYCAARGGGSSVDSEYDVGEFEYDYWGQGTQVTVS

SEQ ID NO: 1292 - protein, 130 aa, Homo sapiens
MAEVQLVESGGGLVQAGGSLRLSFAASGRPFSSLDMGWFRQRPGKERDVVATINWTGDSTYYLDSVKGRFTISRDNAKNTVFLQMNSLKPEDTAVYYCAARGGGSSVDSEYDVGEFEYDYWGQGTQVTVS

SEQ ID NO: 1293 - protein, 133 aa, Homo sapiens
MAEVQLVESGGGLVQAGGSLRLSCVASVASGRTFGWYDMGWFRQAPGKEREFVATISWSGGSTYYADSVKGRSTISRDNAKNTVYLQMNSLKPEDTAVYYCAARGGGTSVDSDYDVGEFEYDYWGQGTQVTVS

SEQ ID NO: 1294 - protein, 133 aa, Homo sapiens
MAEVQLVESGGGLVQAGGSLRLSCVASVASGRTFGWYDMGWFRQAPGKEREFVAAISWSGGSTYYADSVKGRSTISRDNAKNTVYLQMNSLKPEDTAVYYCAARGGGTSVDSDYDVGEFEYDYWGQGTQVTVS

SEQ ID NO: 1295 - protein, 125 aa, Homo sapiens
MAEVQLVESGGGLVQAGGSLRLSCVASGSTFSINDIGWYRQAPGKQRELVAAISSGGRTNYADSVKGRFTISRDNAKNTVYLQMNSLKPEDTAVYYCNADVQNGDYTRGYRYLEVWGQGTQVTVS

SEQ ID NO: 1296 - protein, 129 aa, Homo sapiens
MAEVQLVESGGGLVQAGGSLRLSCVASGRTFSTYTMGWFRQAPGKEREFVAHIGWSGSSTYYADSVKGRFTISRDNAKNTMYLQMNSLKPEDTAVYYCAVAIGSPVDSNRHSDPLEYDYWGQGTQVTVS

SEQ ID NO: 1297 - protein, 127 aa, Homo sapiens
MAEVQLVESGGGLVQAGGSLRLSCVASGRTFSTYTMAWFRQAPGKEREFVAAISWSGTYYADSVKGRFTISRDNAKNTVYLQMNSLKPEDTAVYYCAAVIGSTVDSYSPSDPLEYDYWGQGTQVTVS

SEQ ID NO: 1298 - protein, 129 aa, Homo sapiens
MAEVQLVESGGGLVQAGGSLRLSCVASGRTFRYYSMGWFRQAPGKEREFVSAISWSGDSTYYGDSVKGRFTISRDNAKNTVYLQMDSLKPEDTAVYYCAGAFGSTVDNYDPSDPREYDTWGQGTQVTVS

SEQ ID NO: 1299 - protein, 127 aa, Homo sapiens
MAEVQLVESGGGLVQAGGSLRLSCVASGRTFRTYTMGWFRQAPGKEREFVAHIGWSSTDYADSVKGRFTISRDNAKNTMYLQMNSLKPEDTAVYYCAVAIGSPVDSYRHSDPLEYDYWGQGTQVTVS

SEQ ID NO: 1300 - protein, 130 aa, Homo sapiens
MAEVQLVESGGGLVQAGGSLRLSCVASGRPFSSLDMGWFRQRPGKERDVVATINWTGDSTYYLDSVKGRFTISRDNAKNTVFLQMNSLKPEDTAVYYCAARGGGSSVDSEYDVGEFEYDYWGQGTQVTVS

SEQ ID NO: 1301 - protein, 130 aa, Homo sapiens
MAEVQLVESGGGLVQAGGSLRLSCVASGRPFSSLDMGWFRQAPGKEREFVATISWTGGSTYYADSVKGRFTISRDNAKNTVYLQMNSLKPEDTAVYYCAARGGGTSVDSDYDVEEFEYDYWGQGTQVTVS

SEQ ID NO: 1302 - protein, 127 aa, Homo sapiens
MAEVQLVESGGGLVQAGGSLRLSCVASGGTFSSYDMGWFRQAPGKEREFVAAINWSGGSTDYPDSVKGRFTISRDNAKNTVYLQMNGLKPEDTAVYYCASRWRSGVDPYYYAGTYDYWGQGTQVTVS

SEQ ID NO: 1303 - protein, 127 aa, Homo sapiens
MAEVQLVESGGGLVQAGGSLRLSCTASGRTFSTYVMAWFRQAPGKEREFVAAINWSGTYYADSVKGRFTISRDNAKNTVYLQMNSLKPEDTAVYYCAAVIGSTVDNYSPSDPLEYDYWGQGTQVTVS

SEQ ID NO: 1304 - protein, 127 aa, Homo sapiens
MAEVQLVESGGGLVQAGGSLRLSCTASGRTFSTYTVAWFRQAPGKEREFVAAITWSGTYYADSVKGRFTISRDNAKNTMYLQMNSLKPEDTAVYICAAVIGSTVDSYSPSDPLEYDYWGQGTQVTVS

SEQ ID NO: 1305 - protein, 127 aa, Homo sapiens
MAEVQLVESGGGLVQAGGSLRLSCTASGRTFSTYTTAWFRQAPGKEREFVAAISWSGTYYADSVKGRFTISRDNAKNTVYLQMNSLKPEDTAVYYCAAVIGSTVDSYSPSDPLEYDYWGQGTQVTVS

SEQ ID NO: 1306 - protein, 127 aa, Homo sapiens
MAEVQLVESGGGLVQAGGSLRLSCTASGRTFSTYTMVWFRQAPGKEREFVAAISWSGAYYAESVKGRFTISRDNAKNTVYLQMNSLKPEDTAVYYCAAVIGSTVDSYSPSDPLEYDYWGQGTQVTVS

SEQ ID NO: 1307 - protein, 127 aa, Homo sapiens
MAEVQLVESGGGLVQAGGSLRLSCTASGRTFSTYTMTWFRQAPGKEREFVAAISWSGTYYADSVKGRFTISRDNAKNTVYLQMNSLKPEDTAVYYCAAVIGSTVDSYSPSDPLEYDYWGQGTQVTVS

SEQ ID NO: 1308 - protein, 127 aa, Homo sapiens
MAEVQLVESGGGLVQAGGSLRLSCTASGRTFSTYTMGWFRQAPGKEREFVAHISWSSTYYADSVKGRFTISRDNAKNTMYLQMNSLKPEDTAVYYCAVAIGSPVDSYRHRDPLEYDYWGQGTQVTVS

SEQ ID NO: 1309 - protein, 127 aa, Homo sapiens
MAEVQLVESGGGLVQAGGSLRLSCTASGRTFSTYTMAWFSQAPGKEREFVAAISWSGAYYAESVKGRFTISRDNAKNTVYLQMNSLKPEDTAVYYCAAVIGSTVDSYSPSDPLEYDYWGQGTQVTVS

SEQ ID NO: 1310 - protein, 127 aa, Homo sapiens
MAEVQLVESGGGLVQAGGSLRLSCTASGRTFSTYTMAWFRQTPGKEREFVAAISWSGTYYADSVKGRFTISRDNAKNTVYLQMNSLKPEDTAVYYCAAVIGSTVDSYSPSDPLEYDYWGQGTQVTVS

SEQ ID NO: 1311 - protein, 127 aa, Homo sapiens
MAEVQLVESGGGLVQAGGSLRLSCTASGRTFSTYTMAWFRQAPWKEREFVAAISWSGAYYAESVKGRFTISRDNAKNTVYLQMNSLKPEDTAVYYCAAVIGSTVDSYSPSDPLEYDYWGQGTQVTVS

SEQ ID NO: 1312 - protein, 127 aa, Homo sapiens
MAEVQLVESGGGLVQAGGSLRLSCTASGRTFSTYTMAWFRQAPVKEREFVAAISWSGAYYAESVKGRFTISRDNAKNTVYLQMNSLKPEDTAVYYCAAVIGSTVDSYSPSDPLEYDYWGQGTQVTVS

SEQ ID NO: 1313 - protein, 128 aa, Homo sapiens
MAEVQLVESGGGLVQAGGSLRLSCTASGRTFSTYTMAWFRQAPRKEREFVAAISWSGTYYYADSVKGRFTISRDNAKNTVYLQMNSLKPEDTAVYYCAAVIGSTVDSYSPSDPLEYDYWGQGTQVTVS

SEQ ID NO: 1314 - protein, 127 aa, Homo sapiens
MAEVQLVESGGGLVQAGGSLRLSCTASGRTFSTYTMAWFRQAPGKERGFVAAISWSGTYYADSVKGRFTISRDNAKNTVYLQMNSLKPEDTAVYYCAAVIGSTVDSYSPSDPLEYDYWGQGTQVTVS

SEQ ID NO: 1315 - protein, 127 aa, Homo sapiens
MAEVQLVESGGGLVQAGGSLRLSCTASGRTFSTYTMAWFRQAPGKEREFVVAISWSGTYYADSVKGRFTISRDNAKNTVYLQMNSLKPEDTAVYYCAAVIGSTVDSYSPSDPLEYDYWGQGTQVTVS

SEQ ID NO: 1316 - protein, 127 aa, Homo sapiens
MAEVQLVESGGGLVQAGGSLRLSCTASGRTFSTYTMAWFRQAPGKEREFVSAISWSAVYYADAVKGRFTISRDNAKNTLYLQMNSLKPEDTAVYSCGAVIGSTVDSYSPSDPLEYDYWGQGTQVTVS

SEQ ID NO: 1317 - protein, 127 aa, Homo sapiens
MAEVQLVESGGGLVQAGGSLRLSCTASGRTFSTYTMAWFRQAPGKEREFVSAISWSAVYYADAVKGRFTISRDNAKNTLYLQMNSLKPEDTAVYSCAAVIGSTVDSYSPSDPLEYDYWGQGTQVTVS

SEQ ID NO: 1318 - protein, 127 aa, Homo sapiens
MAEVQLVESGGGLVQAGGSLRLSCTASGRTFSTYTMAWFRQAPGKEREFVGAISWSAVYYADSVKGRFTISRDNAKNTLYLQMNSLKPEDTAVYICAAVIGSTVDSYSPSDPLEYDYWGQGTQVTVS

SEQ ID NO: 1319 - protein, 127 aa, Homo sapiens
MAEVQLVESGGGLVQAGGSLRLSCTASGRTFSTYTMAWFRQAPGKEREFVEAISWSGAYYAESVKGRFTISRDNAKNTVYLQMNSLKPEDTAVYYCAAVIGSTVDSYSPSDPLEYDYWGQGTQVTVS

SEQ ID NO: 1320 - protein, 127 aa, Homo sapiens
MAEVQLVESGGGLVQAGGSLRLSCTASGRTFSTYTMAWFRQAPGKEREFVASITWSGTYYADSVKGRFTISRDNAKNTMYLQMNSLKPEDTAVYICAAVIGSTVDSYSPSDPLEYDYWGQGTQVTVS

SEQ ID NO: 1321 - protein, 127 aa, Homo sapiens
MAEVQLVESGGGLVQAGGSLRLSCTASGRTFSTYTMAWFRQAPGKEREFVASISWSGTYYADSVKGRFTISRDNAKNTVYLQMNSLKPEDTAVYYCAAVIGSTVDSYSPSDPLEYDYWGQGTQVTVS

SEQ ID NO: 1322 - protein, 127 aa, Homo sapiens
MAEVQLVESGGGLVQAGGSLRLSCTASGRTFSTYTMAWFRQAPGKEREFVASISWSGTYYADSVKGRFTISRDNAKNTVYLQMNSLKPEDTAVYYCAAVIGSTVDSYSPGDPLEYDYWGQGTQVTVS

SEQ ID NO: 1323 - protein, 127 aa, Homo sapiens
MAEVQLVESGGGLVQAGGSLRLSCTASGRTFSTYTMAWFRQAPGKEREFVAAVSWSGAYYADSVKGRFTISRDNAKNTVYLQMNSLKPEDTAVYYCAAVIGSTVDSYSPSDPLEYDYWGQGTQVTVS

SEQ ID NO: 1324 - protein, 127 aa, Homo sapiens
MAEVQLVESGGGLVQAGGSLRLSCTASGRTFSTYTMAWFRQAPGKEREFVAAITWSTTYYADSVKGRFTISRDNAKNTMYLQMNNLKPEDTAVYICAAVIGSTVDSYSPSGPLEFDYWGQGTQVTVS

SEQ ID NO: 1325 - protein, 127 aa, Homo sapiens
MAEVQLVESGGGLVQAGGSLRLSCTASGRTFSTYTMAWFRQAPGKEREFVAAITWSTTYYADSVKGRFTISRDNAKNTMYLQMNNLKPEDTAVYICAAVIGSTVDSYSPSDPLEYDYWGQGTQVTVS

SEQ ID NO: 1326 - protein, 126 aa, Homo sapiens
MAEVQLVESGGGLVQAGGSLRLSCTASGRTFSTYTMAWFRQAPGKEREFVAAITWSTTYYADSVKGRFTISRDNAKNTMYLQMNNLKPEDTAVYICAAVIGSTVDSYSPSDPLEYDYWGQGPRSPS

SEQ ID NO: 1327 - protein, 127 aa, Homo sapiens
MAEVQLVESGGGLVQAGGSLRLSCTASGRTFSTYTMAWFRQAPGKEREFVAAITWSTTYYADSVKGRFTISRDNAKNTMYLQMNNLKPEDTAVYICAAVIGSTVDSYSPSDPLEYDDWGQGTQVTVS

SEQ ID NO: 1328 - protein, 127 aa, Homo sapiens
MAEVQLVESGGGLVQAGGSLRLSCTASGRTFSTYTMAWFRQAPGKEREFVAAITWSTTYYADSVKGRFTISRDNAKNMMYLQMNNLKPEDTAVYICAAVIGSTVDSYSPSDPLEYDYWGQGTQVTVS

SEQ ID NO: 1329 - protein, 127 aa, Homo sapiens
MAEVQLVESGGGLVQAGGSLRLSCTASGRTFSTYTMAWFRQAPGKEREFVAAITWSGTYYADSVKGRFTISRENAKNTMYLQMNSLKPEDTAVYICAAVIGSTVDSYSPSDPLEYDYWGQGTQVTVS

SEQ ID NO: 1330 - protein, 127 aa, Homo sapiens
MAEVQLVESGGGLVQAGGSLRLSCTASGRTFSTYTMAWFRQAPGKEREFVAAITWSGTYYADSVKGRFTISRDNAKNTVYLQMNSLKPEDTAVYYCAAVIGSTVDSYSPSDPLEYDYWGQGTQVTVS

SEQ ID NO: 1331 - protein, 127 aa, Homo sapiens
MAEVQLVESGGGLVQAGGSLRLSCTASGRTFSTYTMAWFRQAPGKEREFVAAITWSGTYYADSVKGRFTISRDNAKNTMYLQMNSLKPEDTAVYICAAVIGSTVDSYSPSDPLEYDYWGQGTQVTVS

SEQ ID NO: 1332 - protein, 127 aa, Homo sapiens
MAEVQLVESGGGLVQAGGSLRLSCTASGRTFSTYTMAWFRQAPGKEREFVAAITWSGTYYADSVKGRFTISRDNAKNTMYLQMNSLKPEDTAVYICAAVIGSTVDSYSPRDPLEYDYWGQGTQVTVS

SEQ ID NO: 1333 - protein, 127 aa, Homo sapiens
MAEVQLVESGGGLVQAGGSLRLSCTASGRTFSTYTMAWFRQAPGKEREFVAAITWSGTYYADSVKGRFTISRDNAKNTMYLQMNSLKPEDMAVYICAAVIGSTVDSYSPSDPLEYDYWGQGTQVTVS

SEQ ID NO: 1334 - protein, 127 aa, Homo sapiens
MAEVQLVESGGGLVQAGGSLRLSCTASGRTFSTYTMAWFRQAPGKEREFVAAITWSGTYYADSVKDRFTISRDNAKNTMYLQMNSLKPEDTAVYICAAVIGSTVDSYSPSDPLEYDYWGQGTQVTVS

SEQ ID NO: 1335 - protein, 127 aa, Homo sapiens
MAEVQLVESGGGLVQAGGSLRLSCTASGRTFSTYTMAWFRQAPGKEREFVAAISWSGTYYVDSVKGRFTISRDNAKNTVYLQMNSLKPEDTAVYYCAAVIGSTVDSYSPSDPLEYDYWGQGTQVTVS

SEQ ID NO: 1336 - protein, 127 aa, Homo sapiens
MAEVQLVESGGGLVQAGGSLRLSCTASGRTFSTYTMAWFRQAPGKEREFVAAISWSGTYYTDSVKGRFTISRDNAKNTVYLQMNSLKPEDTAVYYCAAVIGSTVDSYSPSDPLEYDYWGQGTQVTVS

SEQ ID NO: 1337 - protein, 127 aa, Homo sapiens
MAEVQLVESGGGLVQAGGSLRLSCTASGRTFSTYTMAWFRQAPGKEREFVAAISWSGTYYAESVKGRFTISRDNAKNTVYLQMNSLKPEDTAVYYCAAVIGSTVDSYSPSDPLEYDYWGQGTQVTVS

SEQ ID NO: 1338 - protein, 127 aa, Homo sapiens
MAEVQLVESGGGLVQAGGSLRLSCTASGRTFSTYTMAWFRQAPGKEREFVAAISWSGTYYADSVKGRFTISRDNTKNTVYLQMNSLKPEDTAVYYCAAVIGSTVDSYSPSDPLEYDYWGQGTQVTVS

SEQ ID NO: 1339 - protein, 127 aa, Homo sapiens
MAEVQLVESGGGLVQAGGSLRLSCTASGRTFSTYTMAWFRQAPGKEREFVAAISWSGTYYADSVKGRFTISRDNAKNTVYLQMNSMKPEDTAVYYCAAVIGSTVDSYSPSDPLEYDYWGQGTQVTVS

SEQ ID NO: 1340 - protein, 127 aa, Homo sapiens
MAEVQLVESGGGLVQAGGSLRLSCTASGRTFSTYTMAWFRQAPGKEREFVAAISWSGTYYADSVKGRFTISRDNAKNTVYLQMNSLKPKDTAVYYCAAVIGSTVDSYSPSDPLEYDYWGQGTQVTVS

SEQ ID NO: 1341 - protein, 127 aa, Homo sapiens
MAEVQLVESGGGLVQAGGSLRLSCTASGRTFSTYTMAWFRQAPGKEREFVAAISWSGTYYADSVKGRFTISRDNAKNTVYLQMNSLKPEDTVVYYCAAVIGSTVDSYSPSDPLEYDYWGQGTQVTVS

SEQ ID NO: 1342 - protein, 127 aa, Homo sapiens
MAEVQLVESGGGLVQAGGSLRLSCTASGRTFSTYTMAWFRQAPGKEREFVAAISWSGTYYADSVKGRFTISRDNAKNTVYLQMNSLKPEDTTVYYCAAVIGSTVDSYSPSDPLEYDYWGQGTQVTVS

SEQ ID NO: 1343 - protein, 127 aa, Homo sapiens
MAEVQLVESGGGLVQAGGSLRLSCTASGRTFSTYTMAWFRQAPGKEREFVAAISWSGTYYADSVKGRFTISRDNAKNTVYLQMNSLKPEDTAVYYCTAVIGSTVDSYSPSDPLEYDYWGQGTQVTVS

SEQ ID NO: 1344 - protein, 127 aa, Homo sapiens
MAEVQLVESGGGLVQAGGSLRLSCTASGRTFSTYTMAWFRQAPGKEREFVAAISWSGTYYADSVKGRFTISRDNAKNTVYLQMNSLKPEDTAVYYCAAVSGSTVDSYSPSDPLEYDYWGQGTQVTVS

SEQ ID NO: 1345 - protein, 127 aa, Homo sapiens
MAEVQLVESGGGLVQAGGSLRLSCTASGRTFSTYTMAWFRQAPGKEREFVAAISWSGTYYADSVKGRFTISRDNAKNTVYLQMNSLKPEDTAVYYCAAVIRSTVDSYSPSDPLEYDYWGQGTQVTVS

SEQ ID NO: 1346 - protein, 127 aa, Homo sapiens
MAEVQLVESGGGLVQAGGSLRLSCTASGRTFSTYTMAWFRQAPGKEREFVAAISWSGTYYADSVKGRFTISRDNAKNTVYLQMNSLKPEDTAVYYCAAVIGSTVDSYSPSDPLEYEYWGQGTQVTVS

SEQ ID NO: 1347 - protein, 127 aa, Homo sapiens
MAEVQLVESGGGLVQAGGSLRLSCTASGRTFSTYTMAWFRQAPGKEREFVAAISWSGTYYADSVKGRFTISRDNAKNTVYLQMNSLKPEDTAVYYCAAVIGSTVDSYSPSDPLEYDYWGRGTQVTVS

SEQ ID NO: 1348 - protein, 127 aa, Homo sapiens
MAEVQLVESGGGLVQAGGSLRLSCTASGRTFSTYTMAWFRQAPGKEREFVAAISWSGTYYADSVKGRFTISRDNAKNTVYLQMNSLKPEDTAVYYCAAVIGSTVDSYSPSDPLEYDYWGQRTQVTVS

SEQ ID NO: 1349 - protein, 127 aa, Homo sapiens
MAEVQLVESGGGLVQAGGSLRLSCTASGRTFSTYTMAWFRQAPGKEREFVAAISWSGTYYADSVKGRFTISRDNAKNTVYLQMNSLKPEDTAVYYCAAVIGSTVDSYSPSDPLEYDYWGQGTQVTVS

SEQ ID NO: 1350 - protein, 126 aa, Homo sapiens
MAEVQLVESGGGLVQAGGSLRLSCTASGRTFSTYTMAWFRQAPGKEREFVAAISWSGTYYADSVKGRFTISRDNAKNTVYLQMNSLKPEDTAVYYCAAVIGSTVDSYSPSDPLEYDYWGQGPRSPS

SEQ ID NO: 1351 - protein, 127 aa, Homo sapiens
MAEVQLVESGGGLVQAGGSLRLSCTASGRTFSTYTMAWFRQAPGKEREFVAAISWSGTYYADSVKGRFTISRDNAKNTVYLQMNSLKPEDTAVYYCAAVIGSTVDSYSPSDPLEYDYWGKGTQVTVS

SEQ ID NO: 1352 - protein, 127 aa, Homo sapiens
MAEVQLVESGGGLVQAGGSLRLSCTASGRTFSTYTMAWFRQAPGKEREFVAAISWSGTYYADSVKGRFTISRDNAKNTVYLQMNSLKPEDTAVYYCAAVIGSTVDSYSPSDPLEYDYWDQGTQVTVS

SEQ ID NO: 1353 - protein, 127 aa, Homo sapiens
MAEVQLVESGGGLVQAGGSLRLSCTASGRTFSTYTMAWFRQAPGKEREFVAAISWSGTYYADSVKGRFTISRDNAKNTVYLQMNSLKPEDTAVYYCAAVIGSTVDSYSPSDPLEYDYGGQGTQVTVS

SEQ ID NO: 1354 - protein, 127 aa, Homo sapiens
MAEVQLVESGGGLVQAGGSLRLSCTASGRTFSTYTMAWFRQAPGKEREFVAAISWSGTYYADSVKGRFTISRDNAKNTVYLQMNSLKPEDTAVYYCAAVIGSTVDSYSPSDHLEYDYWGQGTQVTVS

SEQ ID NO: 1355 - protein, 127 aa, Homo sapiens
MAEVQLVESGGGLVQAGGSLRLSCTASGRTFSTYTMAWFRQAPGKEREFVAAISWSGTYYADSVKGRFTISRDNAKNTVYLQMNSLKPEDTAVYYCAAVIGSTVDSYSPGDPLEYDYWGQGTQVTVS

SEQ ID NO: 1356 - protein, 127 aa, Homo sapiens
MAEVQLVESGGGLVQAGGSLRLSCTASGRTFSTYTMAWFRQAPGKEREFVAAISWSGTYYADSVKGRFTISRDNAKNTVYLQMNSLKPEDTAVYYCAAVIGSTVDSYSHSDPLEYDYWGQGTQVTVS

SEQ ID NO: 1357 - protein, 127 aa, Homo sapiens
MAEVQLVESGGGLVQAGGSLRLSCTASGRTFSTYTMAWFRQAPGKEREFVAAISWSGTYYADSVKGRFTISRDNAKNTVYLQMNSLKPEDTAVYYCAAVIGSTVDSYGPSDPLEYDYWGQGTQVTVS

SEQ ID NO: 1358 - protein, 127 aa, Homo sapiens
MAEVQLVESGGGLVQAGGSLRLSCTASGRTFSTYTMAWFRQAPGKEREFVAAISWSGTYYADSVKGRFTISRDNAKNTVYLQMNSLKPEDTAVYYCAAVIGSIVDSYSPSDPLEYDYWGQGTQVTVS

SEQ ID NO: 1359 - protein, 127 aa, Homo sapiens
MAEVQLVESGGGLVQAGGSLRLSCTASGRTFSTYTMAWFRQAPGKEREFVAAISWSGTYYADSVKGRFTISRDNAKNTVYLQMNSLKPEDTAVYYCAAFIGSTVDSYSPSDPLEYDYWGQGTQVTVS

SEQ ID NO: 1360 - protein, 127 aa, Homo sapiens
MAEVQLVESGGGLVQAGGSLRLSCTASGRTFSTYTMAWFRQAPGKEREFVAAISWSGTYYADSVKGRFTISRDNAKNTVYLQMNSLKPEDTAIYYCAAVIGSTVDSYSPSDPLEYDYWGQGTQVTVS

SEQ ID NO: 1361 - protein, 127 aa, Homo sapiens
MAEVQLVESGGGLVQAGGSLRLSCTASGRTFSTYTMAWFRQAPGKEREFVAAISWSGTYYADSVKGRFTISRDNAKNTVYLQMNSLKPEDMAVYYCAAVIGSTVDSYSPSDPLEYDYWGQGTQVTVS

SEQ ID NO: 1362 - protein, 127 aa, Homo sapiens
MAEVQLVESGGGLVQAGGSLRLSCTASGRTFSTYTMAWFRQAPGKEREFVAAISWSGTYYADSVKGRFTISRDNAKNTVYLQMNSLKLEDTAVYYCAAVIGSTVDSYSPSDPLEYDYWGQGTQVTVS

SEQ ID NO: 1363 - protein, 127 aa, Homo sapiens
MAEVQLVESGGGLVQAGGSLRLSCTASGRTFSTYTMAWFRQAPGKEREFVAAISWSGTYYADSVKGRFTISRDNAKNTVYLQMNILKPEDTAVYYCAAVIGSTVDSYSPSDPLEYDYWGQGTQVTVS

SEQ ID NO: 1364 - protein, 127 aa, Homo sapiens
MAEVQLVESGGGLVQAGGSLRLSCTASGRTFSTYTMAWFRQAPGKEREFVAAISWSGTYYADSVKGRFTISRDNAKNMVYLQMNSLKPEDTAVYYCAAVIGSTVDSYSPSDPLEYDYWGQGTQVTVS

SEQ ID NO: 1365 - protein, 127 aa, Homo sapiens
MAEVQLVESGGGLVQAGGSLRLSCTASGRTFSTYTMAWFRQAPGKEREFVAAISWSGTYYADSVKGRFTISRDNAKNAVYLQMNSLKPEDTAVYYCAAVIGSTVDSYSPSDPLEYDYWGQGTQVTVS

SEQ ID NO: 1366 - protein, 127 aa, Homo sapiens
MAEVQLVESGGGLVQAGGSLRLSCTASGRTFSTYTMAWFRQAPGKEREFVAAISWSGTYYADSVKGQFTISRDNAKNTVYLQMNSLKPEDTAVYYCAAVIGSTVDSYSPSDPLEYDYWGQGTQVTVS

SEQ ID NO: 1367 - protein, 127 aa, Homo sapiens
MAEVQLVESGGGLVQAGGSLRLSCTASGRTFSTYTMAWFRQAPGKEREFVAAISWSGTYYADSVKDRFTISRDNAKNTVYLQMNSLKPEDTAVYYCAAVIGSTVDSYSPSDPLEYDYWGQGTQVTVS

SEQ ID NO: 1368 - protein, 127 aa, Homo sapiens
MAEVQLVESGGGLVQAGGSLRLSCTASGRTFSTYTMAWFRQAPGKEREFVAAISWSGTYYADSMKGRFTISRDNAKNTVYLQMNSLKPEDTAVYYCAAVIGSTVDSYSPSDPLEYDYWGQGTQVTVS

SEQ ID NO: 1369 - protein, 127 aa, Homo sapiens
MAEVQLVESGGGLVQAGGSLRLSCTASGRTFSTYTMAWFRQAPGKEREFVAAISWSGAYYTESVKGRFTISRDNAKNTVYLQMNSLKPEDTAVYYCAAVIGSTVDSYSPSDPLEYDYWGQGTQVTVS

SEQ ID NO: 1370 - protein, 127 aa, Homo sapiens
MAEVQLVESGGGLVQAGGSLRLSCTASGRTFSTYTMAWFRQAPGKEREFVAAISWSGAYYLDSVKGRFTISRDNAKNTVYLQMNSLKPEDTAIYYCAAVIGSTVDSYSPSDPLEYDYWGPGTQVTVS

SEQ ID NO: 1371 - protein, 127 aa, Homo sapiens
MAEVQLVESGGGLVQAGGSLRLSCTASGRTFSTYTMAWFRQAPGKEREFVAAISWSGAYYAKSVKGRFTISRDNAKNTVYLQMNSLKPEDTAVYYCAAVIGSTVDSYSPSDPLEYDYWGQGTQVTVS

SEQ ID NO: 1372 - protein, 127 aa, Homo sapiens
MAEVQLVESGGGLVQAGGSLRLSCTASGRTFSTYTMAWFRQAPGKEREFVAAISWSGAYYAESVNGRFTISRDNAKNTVYLQMNSLKPEDTAVYYCAAVIGSTVDSYSPSDPLEYDYWGQGTQVTVS

SEQ ID NO: 1373 - protein, 127 aa, Homo sapiens
MAEVQLVESGGGLVQAGGSLRLSCTASGRTFSTYTMAWFRQAPGKEREFVAAISWSGAYYAESVKGRLTISRDNAKNTVYLQMNSLKPEDTAVYYCAAVIGSTVDSYSPSDPLEYDYWGQGTQVTVS

SEQ ID NO: 1374 - protein, 127 aa, Homo sapiens
MAEVQLVESGGGLVQAGGSLRLSCTASGRTFSTYTMAWFRQAPGKEREFVAAISWSGAYYAESVKGRFTISRDNTKNTVYLQMNSLKPEDTAVYYCAAVIGSTVDSYSPSDPLEYDYWGQGTQVTVS

SEQ ID NO: 1375 - protein, 127 aa, Homo sapiens
MAEVQLVESGGGLVQAGGSLRLSCTASGRTFSTYTMAWFRQAPGKEREFVAAISWSGAYYAESVKGRFTISRDNAKNTVYLQMNSPKPEDTAVYYCAAVIGSTVDSYSPSDPLEYDYWGQGTQVTVS

SEQ ID NO: 1376 - protein, 127 aa, Homo sapiens
MAEVQLVESGGGLVQAGGSLRLSCTASGRTFSTYTMAWFRQAPGKEREFVAAISWSGAYYAESVKGRFTISRDNAKNTVYLQMNSLKPGDTAVYYCAAVIGSTVDSYSPSDPLEYDYWGQGTQVTVS

SEQ ID NO: 1377 - protein, 127 aa, Homo sapiens
MAEVQLVESGGGLVQAGGSLRLSCTASGRTFSTYTMAWFRQAPGKEREFVAAISWSGAYYAESVKGRFTISRDNAKNTVYLQMNSLKPENTAVYYCAAVIGSTVDSYSPSDPLEYDYWGQGTQVTVS

SEQ ID NO: 1378 - protein, 127 aa, Homo sapiens
MAEVQLVESGGGLVQAGGSLRLSCTASGRTFSTYTMAWFRQAPGKEREFVAAISWSGAYYAESVKGRFTISRDNAKNTVYLQMNSLKPEDTVVYYCAAVIGSTVDSYSPSDPLEYDYWGQGTQVTVS

SEQ ID NO: 1379 - protein, 127 aa, Homo sapiens
MAEVQLVESGGGLVQAGGSLRLSCTASGRTFSTYTMAWFRQAPGKEREFVAAISWSGAYYAESVKGRFTISRDNAKNTVYLQMNSLKPEDTTVYYCAAVIGSTVDSYSPSDPLEYDYWGQGTQVTVS

SEQ ID NO: 1380 - protein, 127 aa, Homo sapiens
MAEVQLVESGGGLVQAGGSLRLSCTASGRTFSTYTMAWFRQAPGKEREFVAAISWSGAYYAESVKGRFTISRDNAKNTVYLQMNSLKPEDTAVYYCVAVIGSTVDSYSPSDPLEYDYWGQGTQVTVS

SEQ ID NO: 1381 - protein, 127 aa, Homo sapiens
MAEVQLVESGGGLVQAGGSLRLSCTASGRTFSTYTMAWFRQAPGKEREFVAAISWSGAYYAESVKGRFTISRDNAKNTVYLQMNSLKPEDTAVYYCTAVIGSTVDSYSPSDPLEYDYWGQGTQVTVS

SEQ ID NO: 1382 - protein, 127 aa, Homo sapiens
MAEVQLVESGGGLVQAGGSLRLSCTASGRTFSTYTMAWFRQAPGKEREFVAAISWSGAYYAESVKGRFTISRDNAKNTVYLQMNSLKPEDTAVYYCATVIGSTVDSYSPSDPLEYDYWGQGTQVTVS

SEQ ID NO: 1383 - protein, 127 aa, Homo sapiens
MAEVQLVESGGGLVQAGGSLRLSCTASGRTFSTYTMAWFRQAPGKEREFVAAISWSGAYYAESVKGRFTISRDNAKNTVYLQMNSLKPEDTAVYYCAAVIWSTVDSYSPSDPLEYDYWGQGTQVTVS

SEQ ID NO: 1384 - protein, 127 aa, Homo sapiens
MAEVQLVESGGGLVQAGGSLRLSCTASGRTFSTYTMAWFRQAPGKEREFVAAISWSGAYYAESVKGRFTISRDNAKNTVYLQMNSLKPEDTAVYYCAAVIVSTVDSYSPSDPLEYDYWGQGTQVTVS

SEQ ID NO: 1385 - protein, 127 aa, Homo sapiens
MAEVQLVESGGGLVQAGGSLRLSCTASGRTFSTYTMAWFRQAPGKEREFVAAISWSGAYYAESVKGRFTISRDNAKNTVYLQMNSLKPEDTAVYYCAAVIRSTVDSYSPSDPLEYDYWGQGTQVTVS

SEQ ID NO: 1386 - protein, 127 aa, Homo sapiens
MAEVQLVESGGGLVQAGGSLRLSCTASGRTFSTYTMAWFRQAPGKEREFVAAISWSGAYYAESVKGRFTISRDNAKNTVYLQMNSLKPEDTAVYYCAAVIGSTVYSYSPSDPLEYDYWGQGTQVTVS

SEQ ID NO: 1387 - protein, 127 aa, Homo sapiens
MAEVQLVESGGGLVQAGGSLRLSCTASGRTFSTYTMAWFRQAPGKEREFVAAISWSGAYYAESVKGRFTISRDNAKNTVYLQMNSLKPEDTAVYYCAAVIGSTVDSYSPSDPREYDYWGQGTQVTVS

SEQ ID NO: 1388 - protein, 127 aa, Homo sapiens
MAEVQLVESGGGLVQAGGSLRLSCTASGRTFSTYTMAWFRQAPGKEREFVAAISWSGAYYAESVKGRFTISRDNAKNTVYLQMNSLKPEDTAVYYCAAVIGSTVDSYSPSDPLEYDYWGQGTQVTVS

SEQ ID NO: 1389 - protein, 127 aa, Homo sapiens
MAEVQLVESGGGLVQAGGSLRLSCTASGRTFSTYTMAWFRQAPGKEREFVAAISWSGAYYAESVKGRFTISRDNAKNTVYLQMNSLKPEDTAVYYCAAVIGSTVDSYSPSDPLEYDYWCQGTQVTVS

SEQ ID NO: 1390 - protein, 127 aa, Homo sapiens
MAEVQLVESGGGLVQAGGSLRLSCTASGRTFSTYTMAWFRQAPGKEREFVAAISWSGAYYAESVKGRFTISRDNAKNTVYLQMNSLKPEDTAVYYCAAVIGSTVDSYSPSDPLEYDYGGQGTQVTVS

SEQ ID NO: 1391 - protein, 127 aa, Homo sapiens
MAEVQLVESGGGLVQAGGSLRLSCTASGRTFSTYTMAWFRQAPGKEREFVAAISWSGAYYAESVKGRFTISRDNAKNTVYLQMNSLKPEDTAVYYCAAVIGSTVDSYSPSDPLEYDDWGQGTQVTVS

SEQ ID NO: 1392 - protein, 127 aa, Homo sapiens
MAEVQLVESGGGLVQAGGSLRLSCTASGRTFSTYTMAWFRQAPGKEREFVAAISWSGAYYAESVKGRFTISRDNAKNTVYLQMNSLKPEDTAVYYCAAVIGSTVDSYSPSDPLDYDYWGQGTQVTVS

SEQ ID NO: 1393 - protein, 127 aa, Homo sapiens
MAEVQLVESGGGLVQAGGSLRLSCTASGRTFSTYTMAWFRQAPGKEREFVAAISWSGAYYAESVKGRFTISRDNAKNTVYLQMNSLKPEDTAVYYCAAVIGSTVDSYSPSDHLEYDYWGQGTQVTVS

SEQ ID NO: 1394 - protein, 127 aa, Homo sapiens
MAEVQLVESGGGLVQAGGSLRLSCTASGRTFSTYTMAWFRQAPGKEREFVAAISWSGAYYAESVKGRFTISRDNAKNTVYLQMNSLKPEDTAVYYCAAVIGSTVDSYSHSDPLEYDYWGQGTQVTVS

SEQ ID NO: 1395 - protein, 127 aa, Homo sapiens
MAEVQLVESGGGLVQAGGSLRLSCTASGRTFSTYTMAWFRQAPGKEREFVAAISWSGAYYAESVKGRFTISRDNAKNTVYLQMNSLKPEDTAVYYCAAVIGSTVDSYNPSDPLEYDYWGQGTQVTVS

SEQ ID NO: 1396 - protein, 127 aa, Homo sapiens
MAEVQLVESGGGLVQAGGSLRLSCTASGRTFSTYTMAWFRQAPGKEREFVAAISWSGAYYAESVKGRFTISRDNAKNTVYLQMNSLKPEDTAVYYCAAVIGSTVDSYIPSDPLEYDYWGQGTQVTVS

SEQ ID NO: 1397 - protein, 127 aa, Homo sapiens
MAEVQLVESGGGLVQAGGSLRLSCTASGRTFSTYTMAWFRQAPGKEREFVAAISWSGAYYAESVKGRFTISRDNAKNTVYLQMNSLKPEDTAVYYCAAVIGSTIDSYSPSDPLEYDYWGQGTQVTVS

SEQ ID NO: 1398 - protein, 127 aa, Homo sapiens
MAEVQLVESGGGLVQAGGSLRLSCTASGRTFSTYTMAWFRQAPGKEREFVAAISWSGAYYAESVKGRFTISRDNAKNTVYLQMNSLKPEDTAVYYCAAVIGSTFDSYSPSDPLEYDYWGQGTQVTVS

SEQ ID NO: 1399 - protein, 127 aa, Homo sapiens
MAEVQLVESGGGLVQAGGSLRLSCTASGRTFSTYTMAWFRQAPGKEREFVAAISWSGAYYAESVKGRFTISRDNAKNTVYLQMNSLKPEDTAVYYCAAVIGPTVDSYSPSDPLEYDYWGQGTQVTVS

SEQ ID NO: 1400 - protein, 127 aa, Homo sapiens
MAEVQLVESGGGLVQAGGSLRLSCTASGRTFSTYTMAWFRQAPGKEREFVAAISWSGAYYAESVKGRFTISRDNAKNTVYLQMNSLKPEDTAVYYCAAAIGSTVDSYSPSDPLEYDYWGQGTQVTVS

SEQ ID NO: 1401 - protein, 127 aa, Homo sapiens
MAEVQLVESGGGLVQAGGSLRLSCTASGRTFSTYTMAWFRQAPGKEREFVAAISWSGAYYAESVKGRFTISRDNAKNTVYLQMNSLKHEDTAVYYCAAVIGSTVDSYSPSDPLEYDYWGQGTQVTVS

SEQ ID NO: 1402 - protein, 127 aa, Homo sapiens
MAEVQLVESGGGLVQAGGSLRLSCTASGRTFSTYTMAWFRQAPGKEREFVAAISWSGAYYAESVKGRFTISRDNAKNMVYLQMNSLKPEDTAVYYCAAVIGSTVDSYSPSDPLEYDYWGQGTQVTVS

SEQ ID NO: 1403 - protein, 127 aa, Homo sapiens
MAEVQLVESGGGLVQAGGSLRLSCTASGRTFSTYTMAWFRQAPGKEREFVAAISWSGAYYAESVKGRFTISGDNAKNTVYLQMNSLKPEDTAVYYCAAVIGSTVDSYSPSDPLEYDYWGQGTQVTVS

SEQ ID NO: 1404 - protein, 127 aa, Homo sapiens
MAEVQLVESGGGLVQAGGSLRLSCTASGRTFSTYTMAWFRQAPGKEREFVAAISWSGAYYAESVKGRFIISRDNAKNTVYLQMNSLKPEDTAVYYCAAVIGSTVDSYSPSDPLEYDYWGQGTQVTVS

SEQ ID NO: 1405 - protein, 127 aa, Homo sapiens
MAEVQLVESGGGLVQAGGSLRLSCTASGRTFSTYTMAWFRQAPGKEREFVAAISWSGAYYAESVKGRFAISRDNAKNTVYLQMNSLKPEDTAVYYCAAVIGSTVDSYSPSDPLEYDYWGQGTQVTVS

SEQ ID NO: 1406 - protein, 127 aa, Homo sapiens
MAEVQLVESGGGLVQAGGSLRLSCTASGRTFSTYTMAWFRQAPGKEREFVAAISWSGAYYAESVKDRFTISRDNAKNTVYLQMNSLKPEDTAVYYCAAVIGSTVDSYSPSDPLEYDYWGQGTQVTVS

SEQ ID NO: 1407 - protein, 127 aa, Homo sapiens
MAEVQLVESGGGLVQAGGSLRLSCTASGRTFSTYTMAWFRQAPGKEREFVAAISWSGAYYAESVKCRFTISRDNAKNTVYLQMNSLKPEDTAVYYCAAVIGSTVDSYSPSDPLEYDYWGQGTQVTVS

SEQ ID NO: 1408 - protein, 127 aa, Homo sapiens
MAEVQLVESGGGLVQAGGSLRLSCTASGRTFSTYTMAWFRQAPGKEREFVAAISWSGAYYAESVEGRFTISRDNAKNTVYLQMNSLKPEDTAVYYCAAVIGSTVDSYSPSDPLEYDYWGQGTQVTVS

SEQ ID NO: 1409 - protein, 127 aa, Homo sapiens
MAEVQLVESGGGLVQAGGSLRLSCTASGRTFSTYTMAWFRQAPGKEREFVAAISWSGAYYAESMKGRFTISRDNAKNTVYLQMNSLKPEDTAVYYCAAVIGSTVDSYSPSDPLEYDYWGQGTQVTVS

SEQ ID NO: 1410 - protein, 127 aa, Homo sapiens
MAEVQLVESGGGLVQAGGSLRLSCTASGRTFSTYTMAWFRQAPGKEREFVAAISWSGAYYADSVTGRFTISRDNAKNTVYLQMNSLKPEDTAVYYCAAVIGSTVDSYRPGDPLEYDYWGQGTQVTVS

SEQ ID NO: 1411 - protein, 127 aa, Homo sapiens
MAEVQLVESGGGLVQAGGSLRLSCTASGRTFSTYTMAWFRQAPGKEREFVAAISWSDTYYADSVKGRFTISRDNAKNTVYLQMNSLKPEDTAVYYCAAVIGSTVDSYSPSDPLEYDYWGQGTQVTVS

SEQ ID NO: 1412 - protein, 127 aa, Homo sapiens
MAEVQLVESGGGLVQAGGSLRLSCTASGRTFSTYTMAWFRQAPGKEREFVAAISWSDAYYAESVKGRFTISRDNAKNTVYLQMNSLKPEDTAVYYCAAVIGSTVDSYSPSDPLEYDYWGQGTQVTVS

SEQ ID NO: 1413 - protein, 127 aa, Homo sapiens
MAEVQLVESGGGLVQAGGSLRLSCTASGRTFSTYTMAWFRQAPGKEREFVAAISWSCAYYAESVKGRFTISRDNAKNTVYLQMNSLKPEDTAVYYCAAVIGSTVDSYSPSDPLEYDYWGQGTQVTVS

SEQ ID NO: 1414 - protein, 127 aa, Homo sapiens
MAEVQLVESGGGLVQAGGSLRLSCTASGRTFSTYTMAWFRQAPGKEREFVAAIAWSGAYYADSVKGRFTISRDNAKNTVYLQMNSLKPEDTAVYICAAAIGSTVDSYSPSDPLEYDYWGQGTQVTVS

SEQ ID NO: 1415 - protein, 127 aa, Homo sapiens
MAEVQLVESGGGLVQAGGSLRLSCTASGRTFSTYTMAWFRQAPGKEREFVAAIAWSGAYYADSVEGRFTISRDNAKNTVYLQMNSLKPEDTAVYICAAAIGSTVDSYSPSDPLEYDYWGQGTQVTVS

SEQ ID NO: 1416 - protein, 127 aa, Homo sapiens
MAEVQLVESGGGLVQAGGSLRLSCTASGRTFSTYTMAWFRQAPGKERDFVAAISWTGVYYADSVKGRFTISRDNAKNTVYLQMNSLKPEDTAVYYCAAVIGSTVDSYSPSDPLEYDYWGQGTQVTVS

SEQ ID NO: 1417 - protein, 127 aa, Homo sapiens
MAEVQLVESGGGLVQAGGSLRLSCTASGRTFSTYTMAWFRQAPGKERDFVAAISWSGVYYADSVKGRFTISRDNAKNTVYLQMNSLKPEDTAVYYCAAVIGSTVDSYSPSDPLEYDYWGQGTQVTVS

SEQ ID NO: 1418 - protein, 127 aa, Homo sapiens
MAEVQLVESGGGLVQAGGSLRLSCTASGRTFSTYTMAWFRQAPGKERDFVAAISWSGVYYADSVKGRFTISRDNAKNTVFLQMNSLKPEDTAVYYCAAVIGSTVDSYSPSDPLEYDYWGQGTQVTVS

SEQ ID NO: 1419 - protein, 127 aa, Homo sapiens
MAEVQLVESGGGLVQAGGSLRLSCTASGRTFSTYTMAWFRQAPGKERDFVAAISWSGVYYADSVKGRFIISRDNAKNTVYLQMNSLKPEDTAVYYCAAVIGSTVDSYSPSDPLEYDYWGQGTQVTVS

SEQ ID NO: 1420 - protein, 127 aa, Homo sapiens
MAEVQLVESGGGLVQAGGSLRLSCTASGRTFSTYTMAWFRQAPGKERDFVAAISWSGTYYADSVKGRYTISRDNAKNTVYLQMNSLKPEDTAVYYCAAVIGSTVDSYSPSDPLEYDYWGQGTQVTVS

SEQ ID NO: 1421 - protein, 127 aa, Homo sapiens
MAEVQLVESGGGLVQAGGSLRLSCTASGRTFSTYTMAWFRQAPGKERDFVAAISWSGTYYADSVKGRYTISRDNAKNTVHLQMNSLKPEDTAVYYCTAVIGSTVDSYSPSDPLEYDYWGQGTQVTVS

SEQ ID NO: 1422 - protein, 127 aa, Homo sapiens
MAEVQLVESGGGLVQAGGSLRLSCTASGRTFSTYTMAWFRQAPGKERDFVAAISWSGAYYADSVKGRFTISRDNAKNTVYLQMNSLKPEDTVVYYCAAVIGSTVDSYSPSDPLDYDYWGQGTQVTVS

SEQ ID NO: 1423 - protein, 127 aa, Homo sapiens
MAEVQLVESGGGLVQAGGSLRLSCTASGRTFSTYTMAWFRQAPGKERDFVAAISWSGAYYADSVKGRFTISRDNAKNTVYLQMNSLKPEDTAVYYCAAVIGSTVDSYSPSDPLEYDYWGQGTQVTVS

SEQ ID NO: 1424 - protein, 127 aa, Homo sapiens
MAEVQLVESGGGLVQAGGSLRLSCTASGRTFSTYTMAWFRQAPGKERDFVAAISWSGAYYADSVKGRFTISRDNAKNTVYLQMNSLKPEDTAVYYCAAVIGSTVDSYSPSDPLDYNYWGQGTQVTVS

SEQ ID NO: 1425 - protein, 127 aa, Homo sapiens
MAEVQLVESGGGLVQAGGSLRLSCTASGRTFSTYTMAWFRQAPGKERDFVAAISWSGAYYADSVKGRFTISRDNAKNTVYLQMNSLKPEDTAVYYCAAVIGSTVDSYSPSDPLDYDYWGQGTQVTVS

SEQ ID NO: 1426 - protein, 126 aa, Homo sapiens
MAEVQLVESGGGLVQAGGSLRLSCTASGRTFSTYTMAWFRQAPGKERDFVAAISWSGAYYADSVKGRFTISRDNAKNTVYLQMNSLKPEDTAVYYCAAVIGSTVDSYSPSDPLDYDYWARGPRSPS

SEQ ID NO: 1427 - protein, 127 aa, Homo sapiens
MAEVQLVESGGGLVQAGGSLRLSCTASGRTFSTYTMAWFRQAPGKERDFVAAISWSGAYYADSVKGRFTISRDNAKNTVYLQMNSLKPEDTAVYYCAAVIGSTVDSYSHSDPLDYDYWGQGTQVTVS

SEQ ID NO: 1428 - protein, 127 aa, Homo sapiens
MAEVQLVESGGGLVQAGGSLRLSCTASGRTFSTYTMAWFRQAPGKERDFVAAISWSGAYYADSVKGQFTISRDNAKNTVYLQMNSLKPEDTAVYYCAAVIGSTVDSYSPSDPLDYDYWGQGTQVTVS

SEQ ID NO: 1429 - protein, 127 aa, Homo sapiens
MAEVQLVESGGGLVQAGGSLRLSCTASGRTFSTYTMAWFRQAPGKERDFVAAISWSGAYYADSAKGRFTISRDNAKNTVYLQMNSLKPEDTAVYVCAAVIGSTVDSYSPSDPLEYDYWGQGTQVTVS

SEQ ID NO: 1430 - protein, 127 aa, Homo sapiens
MAEVQLVESGGGLVQAGGSLRLSCTASGRTFSTYTMAWFRQAPGKERDFVAAIDWSGVYYADSVKGRFTISRDNAKNTLYLQMNSLKPEDTAVYYCAAVIGSTVDSYSPSDPLEYDYWGQGTQVTVS

SEQ ID NO: 1431 - protein, 127 aa, Homo sapiens
MAEVQLVESGGGLVQAGGSLRLSCTASGRTFSTYTMAWFRQAPGKEHEFVAAISWSGTYYADSVKGRFTISRDNAKNTVYLQMNSLKPEDTAVYYCAAVIGSTVDSYSPSDPLEYDYWGQGTQVTVS

SEQ ID NO: 1432 - protein, 127 aa, Homo sapiens
MAEVQLVESGGGLVQAGGSLRLSCTASGRTFSTYTMAWFRQAPGKEHEFVAAISWSGAYYAESVKGRFTISRDNAKNTVYLQMNSLKPEDTAVYYCAAVIGSTVDSYSPSDPLEYDYWGQGTQVTVS

SEQ ID NO: 1433 - protein, 127 aa, Homo sapiens
MAEVQLVESGGGLVQAGGSLRLSCTASGRTFSTYTMAWFRQAPGKECEFVAAISWSGTYYADSVKGRFTISRDNAKNTVYLQMNSLKPEDTAVYYCAAVIGSTVDSYSPSDPLEYDYWGQGTQVTVS

SEQ ID NO: 1434 - protein, 127 aa, Homo sapiens
MAEVQLVESGGGLVQAGGSLRLSCTASGRTFSTYTMAWFRQAPGKECEFVAAISWSGAYYAESVKGRFTISRDNAKNTVYLQMNSLKPEDTAVYYCAAVIGSTVDSYSPSDPLEYDYWGQGTQVTVS

SEQ ID NO: 1435 - protein, 127 aa, Homo sapiens
MAEVQLVESGGGLVQAGGSLRLSCTASGRTFSTYTMARFRQAPGKEREFVAAISWSGTYYADSVKGRFTISRDNAKNTVYLQMNSLKPEDTAVYYCAAVIGSTVDSYSPSDPLEYDYWGQGTQVTVS

SEQ ID NO: 1436 - protein, 127 aa, Homo sapiens
MAEVQLVESGGGLVQAGGSLRLSCTASGRTFSTYTMARFRQAPGKEREFVAAISWSGAYYAESVKGRFTISRDNAKNTVYLQMNSLKPEDTAVYYCAAVIGSTVDSYSPSDPLEYDYWGQGTQVTVS

SEQ ID NO: 1437 - protein, 127 aa, Homo sapiens
MAEVQLVESGGGLVQAGGSLRLSCTASGRTFSTYSMAWFRQAPGKEREFVAAISWSGAYYLDSVKGRFTISRDNAKNTVYLQMNSLKAEDTAVYYCAAVIGSTVDSYSPSDPLEYDYWGQGTQVTVS

SEQ ID NO: 1438 - protein, 127 aa, Homo sapiens
MAEVQLVESGGGLVQAGGSLRLSCTASGRTFSTYAMAWFRQAPGKEREFVAAISWTGAYYLDSVKGRFTISRDNAKNTMYLQMNSLKPEDTAVYYCAAVIGSTVDSYSPSDPLEYDYWGQGTQVTVS

SEQ ID NO: 1439 - protein, 127 aa, Homo sapiens
MAEVQLVESGGGLVQAGGSLRLSCTASGRTFSTYAMAWFRQAPGKEREFVAAISWSGVDYSESVKGRFTISRDNAKNTVYLQMNSLKPEDTAVYYCAAVIGSTVDSYSPSDPLEYDYWGQGTQVTVS

SEQ ID NO: 1440 - protein, 127 aa, Homo sapiens
MAEVQLVESGGGLVQAGGSLRLSCTASGRTFSTYAMAWFRQAPGKEREFVAAISWSGAYYLDSVKGRFTISRDNAKNTVYLQMNSLKPEDTAVYYCAAVIGSTVDSYSPSDPLEYDYWGQGTQVTVS

SEQ ID NO: 1441 - protein, 127 aa, Homo sapiens
MAEVQLVESGGGLVQAGGSLRLSCTASGRTFSTYAMAWFRQAPGKEREFVAAISWSGAYYLDSVKGRFTISRDNAKNTLYLQMNSLKPEDTAVYYCAAVIGSTVDSYNPSDPLEYDYWGQGTQVTVS

SEQ ID NO: 1442 - protein, 127 aa, Homo sapiens
MAEVQLVESGGGLVQAGGSLRLSCTASGRTFSIYTMAWFRQAPGKEREFVAAISWSGAYYAESVKGRFTISRDNAKNTVYLQMNSLKPEDTAVYYCAAVIGSTVDSYSPSDPLEYDYWGQGTQVTVS

SEQ ID NO: 1443 - protein, 127 aa, Homo sapiens
MAEVQLVESGGGLVQAGGSLRLSCTASGRTFNTYTMAWFRQAPGKEREFVAAISWSGTYYADSVKGRFTISRDNAKNTVYLQMNSLKPEDTAVYYCAAVIGSTVDSYSPSDPLEYDYWGQGTQVTVS

SEQ ID NO: 1444 - protein, 122 aa, Homo sapiens
MAEVQLVESGGGLVQAGGSLRLSCQASGRTFDSGPMAWFRQAPGKEREFVAAIRRSPERIYYADSVKGRFTISRDNAKNTVYLQMNNLKPEDTAVYYCAAALSRSTSVDYDYWGQGTQVTVS

SEQ ID NO: 1445 - protein, 127 aa, Homo sapiens
MAEVQLVESGGGLVQAGGSLRLSCIASGRTFSTYTMAWFRQAPGKEREFVAAISWSGAYYAESVKGRFTISRDNAKNTVYLQMNSLKPEDTAVYYCAAVIGSTVDSYSPSDPLEYDYWGQGTQVTVS

SEQ ID NO: 1446 - protein, 126 aa, Homo sapiens
MAEVQLVESGGGLVQAGGSLRLSCAVSGVSFRNMGWFRQAPGKEREFVAAISWSGDSTVYVDSVKGRVTISRDNAKNTVYLEMNSLKPEDTAVYYCAADGRFRAGQIGPSLGLYHYWGQGTQVTVS

SEQ ID NO: 1447 - protein, 126 aa, Homo sapiens
MAEVQLVESGGGLVQAGGSLRLSCAVSGVSFRNMGWFRQAPGKEREFVAAISWSGDSTVYADSVKGRVTISRDNAKNTVYLEMNTLKPEDTAVYYCAADGRFRAGQIGPSLGLYHYWGQGTQVTVS

SEQ ID NO: 1448 - protein, 126 aa, Homo sapiens
MAEVQLVESGGGLVQAGGSLRLSCAVSGVSFRNMGWFRQAPGKEREFVAAISWSGDSTVYADSVKGRVTISRDNAKNTVYLEMNSLKPEDTAVYYCAADGRFRAGQIGPSLGLYHYWGQGTQVTVS

SEQ ID NO: 1449 - protein, 126 aa, Homo sapiens
MAEVQLVESGGGLVQAGGSLRLSCAVSGVSFRNMGWFRQAPGKEREFVAAISWSGDSTVYADAVKGRVTISRDNAKNTVYLEMNSLKPEDTAVYYCAADGRFRAGEIGTSLGLYRYWGQGTQVTVS

SEQ ID NO: 1450 - protein, 126 aa, Homo sapiens
MAEVQLVESGGGLVQAGGSLRLSCAVSGVSFRNMGWFRQAPGKEREFVAAISWGGDSTIYGDSVKGRVTISRDNAKNTAYLEMNSLKPEDTAVYYCAADGRFRAGRISSDLGLYHYWGQGTQVTVS

SEQ ID NO: 1451 - protein, 126 aa, Homo sapiens
MAEVQLVESGGGLVQAGGSLRLSCAGSGRSFSSYDMGWFRRAPGKEREFVAAITGSRGSTYYADSVKGRFTISRDNAKNTVYLQMNSLKPEDTAVYYCAAGFGSVDGLEYSGSYDDWGQGTQVTVS

SEQ ID NO: 1452 - protein, 126 aa, Homo sapiens
MAEVQLVESGGGLVQAGGSLRLSCAGSGRSFSSYDMGWFRRAPGKEREFVAAISGSRGSTYYADSVKGRFTISRDNAKNTVYLQMNSLKPEDTAVYYCAAGFGSVDGLEYSGSYDDWGQGTQVTVS

SEQ ID NO: 1453 - protein, 131 aa, Homo sapiens
MAEVQLVESGGGLVQAGGSLRLSCADAASGRTFSTYTMGWFRQAPGKEREFVAHINWDGSNTYYADSVKGRFTISRDNAKNTMYLQMNSLKPEDTAVYYCAAAIGSTVDSYRHSDPLEYDYWGQGTQVTVS

SEQ ID NO: 1454 - protein, 116 aa, Homo sapiens
MAEVQLVESGGGLVQAGGSLRLSCAASVSAFSSVPFAWYRQAPGKQRESVARIWLSDTGTYSDSVRGRFTISRDNAKQTLFLEMNSLKPEDTAVYYCNSWPNQNYAWGQGTQVTVS

SEQ ID NO: 1455 - protein, 124 aa, Homo sapiens
MAEVQLVESGGGLVQAGGSLRLSCAASGSIGSINIMGWYRQAPGKQRELVASITTGGATNYADSVKGRFTISRDNAKNTVYLQMNSLKPEDTAVYYCNLDRGTHLGDSFERDDYWGRGTQVTVS

SEQ ID NO: 1456 - protein, 124 aa, Homo sapiens
MAEVQLVESGGGLVQAGGSLRLSCAASGSIGSINIMGWYRQAPGKQRELVASITSGGATNYADSVKGRFTISRDNVKNTMYLQMNSLKPEDTAVYYCNLDRGTHLGDSFERDDYWGRGTQVTVS

SEQ ID NO: 1457 - protein, 124 aa, Homo sapiens
MAEVQLVESGGGLVQAGGSLRLSCAASGSIGSINIMGWYRQAPGKQRELVASITSGGATNYADSVKGRFTISRDNAKNTVYLQMNSLKPEDTAVYYCNLDRGTHLGDSFERDDYWGRGTQVTVS

SEQ ID NO: 1458 - protein, 124 aa, Homo sapiens
MAEVQLVESGGGLVQAGGSLRLSCAASGSIGSINIMGWYRQAPGKQRELVASITSGGATNYADSVKGRFTISRDNAKNTMYLQMNSLKPEDTAVYYCNLDRGTHLGDSFERDDYWGRGTQVTVS

SEQ ID NO: 1459 - protein, 124 aa, Homo sapiens
MAEVQLVESGGGLVQAGGSLRLSCAASGSIGSINIMGWYRQAPGKQRELVASITSGGATNYADSVKGRFTISRDNAKNAVYLQMNSPKPEDTAVYYCNLDRGTHLGDSFERDDYWGRGTQVTVS

SEQ ID NO: 1460 - protein, 124 aa, Homo sapiens
MAEVQLVESGGGLVQAGGSLRLSCAASGSIGSINIMGWYRQAPGKQRELVASITSGGATNYADSVKGRFTISRDNAKNAVYLQMNSLKPEDTAVYYCNLDRGTHLGDSFERDDYWGRGTQVTVS

SEQ ID NO: 1461 - protein, 122 aa, Homo sapiens
MAEVQLVESGGGLVQAGGSLRLSCAASGSIFRIDVMGWYRQAPGKQRELVTAITSGGITNYADSVKGRFTISRDNAENTMYLQMNSLKPEDTAVYYCAKGISDSYLRVESNYRGQGTQVTVS

SEQ ID NO: 1462 - protein, 129 aa, Homo sapiens
MAEVQLVESGGGLVQAGGSLRLSCAASGSIFGVSAMSWHRQAPGKQRELVARILSGGSTDYADSVKGRFTISRDNAKNTVYLQMNSLKPEDTAVYYCAARGGGSSVDSEYDVGEFEYDYWGQGTQVTVS

SEQ ID NO: 1463 - protein, 129 aa, Homo sapiens
MAEVQLVESGGGLVQAGGSLRLSCAASGRTLMRYTMGWFRQAPGLERDFVAEISWSGGNTGYADSVKGRFTISRDNAKNTVYLQMNSLKPQDTAVYYCAAVIGSPTDYSDYRSSLDYDYWGQGTQVTVS

SEQ ID NO: 1464 - protein, 129 aa, Homo sapiens
MAEVQLVESGGGLVQAGGSLRLSCAASGRTFTHLNMGWFRQAPGKEREFTAHINWSGGSTNYADSVKGRFTISRDNAKNTVYLQMNSLKPEDTAVYYCAATLGDSVDLDSDADPRGYDYWGQGTQVTVS

SEQ ID NO: 1465 - protein, 128 aa, Homo sapiens
MAEVQLVESGGGLVQAGGSLRLSCAASGRTFSTYVMAWFRQAPGKEREFVAAISWNGSTYYADSVKGRFTISRDNAKNTVYLQMNSLSPEDTAVYYCAAAIGSTVDSYSPSDPLEYDYWGQGTQVTVS

SEQ ID NO: 1466 - protein, 129 aa, Homo sapiens
MAEVQLVESGGGLVQAGGSLRLSCAASGRTFSTYTMGWFRQAPGKEREFVAHISWSGSTTYYADSVKGRFTISRDNAKNTMYLQMNSLKPEDTSVYYCAVAIGSPVDSYRHSDPLEYDYWGQGTQVTVS

SEQ ID NO: 1467 - protein, 129 aa, Homo sapiens
MAEVQLVESGGGLVQAGGSLRLSCAASGRTFSTYTMGWFRQAPGKEREFVAHINWSGSSTYYADSVKGRFTISRDNAKNTMYLQMNSLKPDDTAVYYCAVTIGSPVDSYRHSDPLEYDYWGQGTQVTVS

SEQ ID NO: 1468 - protein, 128 aa, Homo sapiens
MAEVQLVESGGGLVQAGGSLRLSCAASGRTFSTYTMGWFRQAPGKEREFVAAVTWSETLYSDSVKGRFTISRDNAKNTVYLQMNSLKPEDTAVYYCAAVQGSPVDTIVVLTTSEEYDYWGQGTQVTVS

SEQ ID NO: 1469 - protein, 127 aa, Homo sapiens
MAEVQLVESGGGLVQAGGSLRLSCAASGRTFSTYTMAWFRQAPGKEREFVAAITWSTTYYADSVKGRFTISRDNAKNTMYLQMNNLKPEDTAVYICAAVIGSTVDSYSPSDPLEYDYWGQGTQVTVS

SEQ ID NO: 1470 - protein, 127 aa, Homo sapiens
MAEVQLVESGGGLVQAGGSLRLSCAASGRTFSTYTMAWFRQAPGKEREFVAAISWSGTYYADSVKGRFTISRDNAKNTVYLQMNSLKPEDTAVYYCAAVIGSTVDSYSPSDPLEYDYWGQGTQVTVS

SEQ ID NO: 1471 - protein, 127 aa, Homo sapiens
MAEVQLVESGGGLVQAGGSLRLSCAASGRTFSTYTMAWFRQAPGKEREFVAAISWSGAYYAESVKGRFTISRDNAKNTVYLQMNSLKPEDTAVYYCAAVIGSTVDSYSPSDPLEYDYWGQGTQVTVS

SEQ ID NO: 1472 - protein, 129 aa, Homo sapiens
MAEVQLVESGGGLVQAGGSLRLSCAASGRTFSTYTMAWFRQAPGKEREFVAAISWNGGSTYYADSVKGRFTIFRDNAKNMVYLQMNNLKPEDTAVYYCAAAIGSTVDSYDPGDPLEYDYWGQGTQVTVS

SEQ ID NO: 1473 - protein, 127 aa, Homo sapiens
MAEVQLVESGGGLVQAGGSLRLSCAASGRTFSTYTLGWFRQAPGKEREFVGTITWSGSSTADSVKGRFTISRDNAKNTVYLQMNSLKPEDTAVYYCAAAIGSSVDSDYPSDPLEYDYWGQGTQVTVS

SEQ ID NO: 1474 - protein, 127 aa, Homo sapiens
MAEVQLVESGGGLVQAGGSLRLSCAASGRTFSTYTLGWFRQAPGKEREFVGAITWSGSSTADSVKGRFTISRDNAKNTVYLQMNSLKPEDTAVYYCAAAIGSSVDSYYPSDPLEYDYWGQGTQVTVS

SEQ ID NO: 1475 - protein, 127 aa, Homo sapiens
MAEVQLVESGGGLVQAGGSLRLSCAASGRTFSTYTLGWFRQAPGKEREFVGAITWSGGTTADSVKGRFSISRDNAKNTVYLQMNSLKPEDTAVYYCAAVIGSTVDSYDPSDPIEYDYWGQGTQVTVS

SEQ ID NO: 1476 - protein, 127 aa, Homo sapiens
MAEVQLVESGGGLVQAGGSLRLSCAASGRTFSTYTLGWFRQAPGKEREFVGAITWSGGTTADSVKGRFNISRDNAKNTVYLQMNSLKPEDTAVYYCAAVIGSTVDSYDPSDPIEYDYWGQGTQVTVS

SEQ ID NO: 1477 - protein, 128 aa, Homo sapiens
MAEVQLVESGGGLVQAGGSLRLSCAASGRTFSTYTLGWFRQAPGKEREFVAAITWSSGTYYADSVKGRFTISRDNAKNTVYLQMNSLKPEDTAVYYCAAVIGSTVDTYNPGDPLEYDYWGQGTQVTVS

SEQ ID NO: 1478 - protein, 128 aa, Homo sapiens
MAEVQLVESGGGLVQAGGSLRLSCAASGRTFSTYTLGWFRQAPGKEREFVAAITWSAGTYYADSMKGRFTISRDNAKNTVYLQMNSLKPEDTAVYYCAAVIGSTVDTYNPGDPLEYDYWGQGTQVTVS

SEQ ID NO: 1479 - protein, 128 aa, Homo sapiens
MAEVQLVESGGGLVQAGGSLRLSCAASGRTFSTYTLGWFRQAPGKEREFVAAINWSSGTYYADSVKGRFTISRDNAKNTVYLQMNSLKPEDTAVYYCAAVIGSTVDTYNPGDPLEYDYWGQGTQVTVS

SEQ ID NO: 1480 - protein, 129 aa, Homo sapiens
MAEVQLVESGGGLVQAGGSLRLSCAASGRTFSTYTLGWFRQAPGKEREFVAAINWSGGTTYYADSVKGRFTISRNNAKNTVYLQMNSLKPEDTAVYYCAAVIGSTVDSYDPGDPLEYDYWGQGTQVTVS

SEQ ID NO: 1481 - protein, 127 aa, Homo sapiens
MAEVQLVESGGGLVQAGGSLRLSCAASGRTFSTYTLAWFRQAPGKEREFVGAITWSGASTADSVKGRFTISRDNAKNTVYLQMNSLKPEDTAVYYCAAAIGSTVDSYHPSDPLDYDYWGQGTQVTVS

SEQ ID NO: 1482 - protein, 127 aa, Homo sapiens
MAEVQLVESGGGLVQAGGSLRLSCAASGRTFSTYSLGWFRQAPGKEREFVGAISWSGSTTADSVKGRFTISRDNAKNTVYLQMNNLKPEDTAVYYCAAAIGSTVDSYNPSDPLEYDYWGQGTQVTVS

SEQ ID NO: 1483 - protein, 129 aa, Homo sapiens
MAEVQLVESGGGLVQAGGSLRLSCAASGRTFSTYEMAWFRQAPGKEREFVAAINWSGSSTYYADSVKGRFTISRDNAKNTVYLQMNSPKPEDTAVYVCAAVIGSTVDEYRPSDPLEYDYWGQGTQVTVS

SEQ ID NO: 1484 - protein, 129 aa, Homo sapiens
MAEVQLVESGGGLVQAGGSLRLSCAASGRTFSTYEMAWFRQAPGKEREFVAAINWSGSSTYYADSVKGRFTISRDNAKNTVYLQMNSLKPEDTAVYVCAAVIGSTVDEYRPSDPLEYNYWGQGTQVTVS

SEQ ID NO: 1485 - protein, 129 aa, Homo sapiens
MAEVQLVESGGGLVQAGGSLRLSCAASGRTFSTYEMAWFRQAPGKEREFVAAINWSGSSTYYADSVKGRFTISRDNAKNTVYLQMNSLKPEDTAVYVCAAVIGSTVDEYRPSDPLEYDYWGQGTQVTVS

SEQ ID NO: 1486 - protein, 129 aa, Homo sapiens
MAEVQLVESGGGLVQAGGSLRLSCAASGRTFSSYTMGWFRQAPGLERDFVAEISWNGGSTGYADSVKGRFTISRDNAKNTVYLQMNSLKPQDTAVYYCAAVIGSPTDSSDYRSSLDYDYWGQGTQVTVS

SEQ ID NO: 1487 - protein, 129 aa, Homo sapiens
MAEVQLVESGGGLVQAGGSLRLSCAASGRTFSSYTMGWFHQAPGKEREFVAEISGTGGNTGYSDSVKGRFTISRDNAKNTVYLQMNSLKLEDTAVYYCAAVLGSPTDSSDYRSTLDYDYWGQGTQVTVS

SEQ ID NO: 1488 - protein, 129 aa, Homo sapiens
MAEVQLVESGGGLVQAGGSLRLSCAASGRTFSSYTMGWFHQAPGKEREFVAEISGTGGNTGYADSVKGRFTISRDNAKNTVYQQMNSLKPEDTAAYYCAAVIGSPTDSSDYRSSLDYDYWGQGTQVTVS

SEQ ID NO: 1489 - protein, 129 aa, Homo sapiens
MAEVQLVESGGGLVQAGGSLRLSCAASGRTFSSYTMGWFHQAPGKEREFVAEISGTGGNTGYADSVKGRFTISRDNAKNTVYLQMNTLKPEDTAVYYCAAVIGSPTDSSDYRSSLDYDYWGQGTQVTVS

SEQ ID NO: 1490 - protein, 129 aa, Homo sapiens
MAEVQLVESGGGLVQAGGSLRLSCAASGRTFSSYTMGWFHQAPGKEREFVAEISGTGGNTGYADSVKGRFTISRDNAKNTVYLQMNSLKPEDTAAYYCAAVIGSPTDSSDYRSSLDYDYWGQGTQVTVS

SEQ ID NO: 1491 - protein, 129 aa, Homo sapiens
MAEVQLVESGGGLVQAGGSLRLSCAASGRTFSSYTMGWFHQAPGKEREFVAEISGTGGNTGYADSVKGRFTISRDNAKNTVYLQMNSLKPEDTAAYYCAAVIGSPTDASDYRSSLDYDYWGQGTQVTVS

SEQ ID NO: 1492 - protein, 129 aa, Homo sapiens
MAEVQLVESGGGLVQAGGSLRLSCAASGRTFSSYTMGWFHQAPGKEREFVAEISGTGGNTGYADSVKGRFTIFRDNAKNTVYLQMNSLKPEDTAAYYCAAVIGSPTDSSDYRSSLDYDYWGQGTQVTVS

SEQ ID NO: 1493 - protein, 129 aa, Homo sapiens
MAEVQLVESGGGLVQAGGSLRLSCAASGRTFSSYTMGWFHQAPGKEREFVAEIGGTGGNTGYADSVKGRFTISRDNAKNTVYLQMNSLKPEDTAVYYCAAVIGSPTDSSNYRSSLDYDYWGQGTQVTVS

SEQ ID NO: 1494 - protein, 129 aa, Homo sapiens
MAEVQLVESGGGLVQAGGSLRLSCAASGRTFSSYTMGWFHQAPGKERDFVAEISGTGGNIGYADSVKGRFTISRDNAKNTVYLQMNSLKPEDTAIYYCAAVIGSPTDSSDYRSSLDYDYWGQGTQVTVS

SEQ ID NO: 1495 - protein, 129 aa, Homo sapiens
MAEVQLVESGGGLVQAGGSLRLSCAASGRTFSSYTMGWFHQAPGKEHEFVAEIGGTGGNTGYADSVKGRFTISRDNAKNTVYLQMNSLKPEDTAVYYCAAVIGSPTDSSDYRSSLDYDYWGQGTQVTVS

SEQ ID NO: 1496 - protein, 129 aa, Homo sapiens
MAEVQLVESGGGLVQAGGSLRLSCAASGRTFSSYTMGWFHQAPGKECEFVAEIGGTGGNTGYADSVKGRFTISRDNAKNTVYLQMNSLKPEDTAVYYCAAVIGSPTDSSDYRSSLDYDYWGQGTQVTVS

SEQ ID NO: 1497 - protein, 130 aa, Homo sapiens
MAEVQLVESGGGLVQAGGSLRLSCAASGRTFSSLDMGWFRQRPGKERDVVATINWTGDSTYYLDSVKGRFTISRDNAKNTVFLQMNSLKPEDTAVYYCAARGGGSSVDSEYDVGEFEYDYWGQGTQVTVS

SEQ ID NO: 1498 - protein, 130 aa, Homo sapiens
MAEVQLVESGGGLVQAGGSLRLSCAASGRTFSSLDMGWFRQAPGKEREFVATISWTGGSTYYADSVKGRFTISRDNAKNTVYLQMNSLKPEDTAVYYCAARGGGTSVDSDYDVEEFEYDYWGQGTQVTVS

SEQ ID NO: 1499 - protein, 130 aa, Homo sapiens
MAEVQLVESGGGLVQAGGSLRLSCAASGRTFSSLAMGWFRQAPGKEREFVAAISWSGGSTYYADSVKGRFTISRDNAKNTVYLQMNSLKPEDTAVYYCAARGGGSSVDSEYDVGEFEYDYWGQGTQVTVS

SEQ ID NO: 1500 - protein, 129 aa, Homo sapiens
MAEVQLVESGGGLVQAGGSLRLSCAASGRTFSRYTMGWFHQAPGKEREFVAEISGTGGNTGYADSVKGRFTMSRDNAKNTVYLQMNSLKPEDTGVYYCAAVIGSPTDSSDYRSSLDYDYWGQGTQVTVS

SEQ ID NO: 1501 - protein, 130 aa, Homo sapiens
MAEVQLVESGGGLVQAGGSLRLSCAASGRTFSRYAMGWFRQALGKEREFVATVSWTGSSTNYADSVKGRFTISRDNAKNTVYLEMNSLKPEDTAVYYCAARGGGTSVDSDYDVGEFEYDYWGQGTQVTVS

SEQ ID NO: 1502 - protein, 119 aa, Homo sapiens
MAEVQLVESGGGLVQAGGSLRLSCAASGRTFSRVGWFHQPAPEKRREVVAAISWRSGDTYYTHFVEGRFTISRDNAKNTVYLQMNSLTPEDTAVYYCAASDKSTGPYEYWGQGTQVTVS

SEQ ID NO: 1503 - protein, 118 aa, Homo sapiens
MAEVQLVESGGGLVQAGGSLRLSCAASGRTFSRVGWFHQPAPEKRREVVAAISWRSGDTYYTHFVEGRFTISRDNAKNTVYLQMNSLTPEDTAVYYCAASDKSTGPYEYWGQGPRSPS

SEQ ID NO: 1504 - protein, 126 aa, Homo sapiens
MAEVQLVESGGGLVQAGGSLRLSCAASGRTFSDYTMGWFRRAPGKEREFVATISTGGGSTKYADSVKGRFTISRDNTKNMVYLQMNSLKPEDTAVYYCAASLRGYYSGSYSREYDYWGQGTQVTVS

SEQ ID NO: 1505 - protein, 126 aa, Homo sapiens
MAEVQLVESGGGLVQAGGSLRLSCAASGRTFSDYTMGWFRRAPGKEREFVATISTGGGSTKYADSVKGRFTISRDNAKNMVYLQMNSLKPEDTAVYYCAASHRGYYSGSYSREYDNWGQGTQVTVS

SEQ ID NO: 1506 - protein, 126 aa, Homo sapiens
MAEVQLVESGGGLVQAGGSLRLSCAASGRTFSDYTMGWFRRAPGKEREFVATISTGGGSTKYADSVKGRFTISRDNAKNMVYLQMNSLKPEDTAVYYCAASHRGYYSGSYSREYDDWGQGTQVTVS

SEQ ID NO: 1507 - protein, 126 aa, Homo sapiens
MAEVQLVESGGGLVQAGGSLRLSCAASGRTFSDWTMGWFRRAPGKEREFVATISTGGGSTKYADSVKGRFTISRDNAKNMVYLQMNSLKPEDTAVYYCAASHRGYYSGSYSREYDNWGQGTQVTVS

SEQ ID NO: 1508 - protein, 129 aa, Homo sapiens
MAEVQLVESGGGLVQAGGSLRLSCAASGRTFRYYSMGWFRQAPGKEREFVSAISWSGDSTYYGDSVKGRFTISRDNAKNTVYLQMDSLKPEDTAVYYCAGAFGSTVDNYDPSDPREYDTWGQGTQVTVS

SEQ ID NO: 1509 - protein, 126 aa, Homo sapiens
MAEVQLVESGGGLVQAGGSLRLSCAASGRTFRSYTMGWFRQAPGKEREFVAAISWSGGSTYYADSVKGRFTISRDNTKTTVYLQMNSLKPEDTAVYYCAASKYYSGNYYSQVRYDYWGQGTQVTVS

SEQ ID NO: 1510 - protein, 126 aa, Homo sapiens
MAEVQLVESGGGLVQAGGSLRLSCAASGRTFRSYTMGWFRQAPGKEREFVAAISWSGGSTYYADSVKGRFTISRDNAKTTVYLQMNSLKPEDTAVYYCAASKYYSGNYYSQVRYDYWGQGTQVTVS

SEQ ID NO: 1511 - protein, 126 aa, Homo sapiens
MAEVQLVESGGGLVQAGGSLRLSCAASGRTFRSYTMGWFRQAPGKEREFVAAISWSGGSTYYADSAKGRFTISRDNAKTTVYLQMNSLKPEDTAVYYCAASKYYSGNYYSQVRYDYWGQGTQVTVS

SEQ ID NO: 1512 - protein, 134 aa, Homo sapiens
MAEVQLVESGGGLVQAGGSLRLSCAASGRTFGMSTMGWFRQAPGKERELVSTISIIWRDGRTQSGGRTHYADSVKGRFTISRDDAKNTVYLQMDSLKPEDTALYYCAARFGSSVDVIIPDDYDYWGQGTQVTVS

SEQ ID NO: 1513 - protein, 125 aa, Homo sapiens
MAEVQLVESGGGLVQAGGSLRLSCAASGRSFSSYSMGWFRQAPGKDREFVAAITARGMNPYYTDSVKGRFIISRDNAKNALYLQMNSLKREDTAVYYCVGRFRGDWGTQDAKWDYWGQGTQVTVS

SEQ ID NO: 1514 - protein, 126 aa, Homo sapiens
MAEVQLVESGGGLVQAGGSLRLSCAASGRSFSSYDMGWFRRAPGKEREFVAAISGSRGSTDYSDSVKGRFTISRDNAKNTVYLQMNRLKPEDTAVYYCAAGFGSVDGLEYPISYDDWGQGTQVTVS

SEQ ID NO: 1515 - protein, 126 aa, Homo sapiens
MAEVQLVESGGGLVQAGGSLRLSCAASGRSFSSLDMGWFRRAPGKEREFVAAISGSRGSTDYSDSVKGRFTISRDNTKNTVYLQMNRLKPEDAAVYYCAAGFGSVDGLEYPISYDDWGQGTQVTVS

SEQ ID NO: 1516 - protein, 126 aa, Homo sapiens
MAEVQLVESGGGLVQAGGSLRLSCAASGRSFSSLDMGWFRRAPGKEREFVAAISGSRGSTDYSDSVKGRFTISRDNAKNTVYLQMNRLKPEDAAVYYCAAGFGSVDGLEYPISYDDWGQGTQVTVS

SEQ ID NO: 1517 - protein, 126 aa, Homo sapiens
MAEVQLVESGGGLVQAGGSLRLSCAASGRSFSSLDMGWFRRAPGKEREFVAAISGSRGSTDYSDSMKGRFTISRDNAKNTVYLQMNRLKPEDAAVYYCAAGFGSVDGLEYPISYDDWGQGTQVTVS

SEQ ID NO: 1518 - protein, 130 aa, Homo sapiens
MAEVQLVESGGGLVQAGGSLRLSCAASGRSFSSLDMGWFRQRPGKERDVVATINWTGDSTYYLDSVKGRFTISRDNAKNTVFLQMNSLKPEDTAVYYCAARGGGSSVDSEYDVGEFEYDYWGQGTQVTVS

SEQ ID NO: 1519 - protein, 127 aa, Homo sapiens
MAEVQLVESGGGLVQAGGSLRLSCAASGRSFDRYTMAWFRQGPGKEREFVATVGWNDNSIYYADSVKGRFTISRDNAKNTVYLQMNSLKPEDTAVYYCAATFGSPVDTPLDRGAYDFWGQGTQVTVS

SEQ ID NO: 1520 - protein, 130 aa, Homo sapiens
MAEVQLVESGGGLVQAGGSLRLSCAASGRPFSSVDMGWFRQRPGKERDVVATINWTGDSTYYLDSVKGRFTISRDNAKNTVFLQMNSLKPEDTAVYYCAARGGGSSVDSEYDVGEFEYDYWGQGTQVTVS

SEQ ID NO: 1521 - protein, 130 aa, Homo sapiens
MAEVQLVESGGGLVQAGGSLRLSCAASGRPFSSSDMGWFRQAPGKEREFVATISWTGGSTYYADSVKGRFTISRDNAKNTVYLQMNSLKPEDTAVYYCAARGGGTSVDSDYDVEEFEYDYWGQGTQVTVS

SEQ ID NO: 1522 - protein, 130 aa, Homo sapiens
MAEVQLVESGGGLVQAGGSLRLSCAASGRPFSSLVMGWFRQRPGKERDVVATINWTGDSTYYLDSVKGRFTISRDNAKNTVFLQMNSLKPEDTAVYYCAARGGGSSVDSEYDVGEFEYDYWGQGTQVTVS

SEQ ID NO: 1523 - protein, 130 aa, Homo sapiens
MAEVQLVESGGGLVQAGGSLRLSCAASGRPFSSLNMGWFRQRPGKERDVVATINWTGDSTYYLDSVKGRFTISRDNAKNTVFLQMNSLKPEDTAVYYCAARGGGSSVDSEYDVGEFEYDYWGQGTQVTVS

SEQ ID NO: 1524 - protein, 130 aa, Homo sapiens
MAEVQLVESGGGLVQAGGSLRLSCAASGRPFSSLDVGWFRQRPGKERDVVATINWTGDSTYYLDSVKGRFTISRDNAKNTVFLQMNSLKPEDTAVYYCAARGGGSSVDSEYDVGEFEYDYWGQGTQVTVS

SEQ ID NO: 1525 - protein, 130 aa, Homo sapiens
MAEVQLVESGGGLVQAGGSLRLSCAASGRPFSSLDTGWFRQRPGKERDVVATINWTGDSTYYLDSVKGRFTISRDNAKNTVFLQMNSLKPEDTAVYYCAARGGGSSVDSEYDVGEFEYDYWGQGTQVTVS

SEQ ID NO: 1526 - protein, 130 aa, Homo sapiens
MAEVQLVESGGGLVQAGGSLRLSCAASGRPFSSLDMVWFRQRPGKERDVVATINWTGDSTYYLDSVKGRFTISRDNAKNTVFLQMNSLKPEDTAVYYCAARGGGSSVDSEYDVGEFEYDYWGQGTQVTVS

SEQ ID NO: 1527 - protein, 130 aa, Homo sapiens
MAEVQLVESGGGLVQAGGSLRLSCAASGRPFSSLDMSWFRQAPGKEREFVATISWTGGSTYYADSVKGRFTISRDNAKNTVYLQMNSLKPEDTAVYYCAARGGGTSVDSDYDVEEFEYDYWGQGTQVTVS

SEQ ID NO: 1528 - protein, 130 aa, Homo sapiens
MAEVQLVESGGGLVQAGGSLRLSCAASGRPFSSLDMGWLRQRPGKERDVVATINWTGDSTYYLDSVKGRFTISRDNAKNTVFLQMNSLKPEDTAVYYCAARGGGSSVDSEYDVGEFEYDYWGQGTQVTVS

SEQ ID NO: 1529 - protein, 130 aa, Homo sapiens
MAEVQLVESGGGLVQAGGSLRLSCAASGRPFSSLDMGWFRQRPGKERDVVSTINWTGDSTYYLDSVKGRFTISRDNAKNTVFLQMNSLKPEDTAVYYCAARGGGSSVDSEYDVGEFEYDYWGQGTQVTVS

SEQ ID NO: 1530 - protein, 130 aa, Homo sapiens
MAEVQLVESGGGLVQAGGSLRLSCAASGRPFSSLDMGWFRQRPGKERDVVATINWTSDSTYYLDSVKGRFTISRDNAKNTVFLQMNSLKPEDTAVYYCAARGGGSSVDSEYDVGEFEYDYWGQGTQVTVS

SEQ ID NO: 1531 - protein, 130 aa, Homo sapiens
MAEVQLVESGGGLVQAGGSLRLSCAASGRPFSSLDMGWFRQRPGKERDVVATINWTGNSTYYLDSVKGRFTISRDNAKNTVFLQMNSLKPEDTAVYYCAARGGGSSVDSEYDVGEFEYDYWGQGTQVTVS

SEQ ID NO: 1532 - protein, 130 aa, Homo sapiens
MAEVQLVESGGGLVQAGGSLRLSCAASGRPFSSLDMGWFRQRPGKERDVVATINWTGGSTYYLDSVKGRFTISRDNAKNTVFLQMNSLKPEDTAVYYCAARGGGSSVDSEYDVGEFEYDYWGQGTQVTVS

SEQ ID NO: 1533 - protein, 130 aa, Homo sapiens
MAEVQLVESGGGLVQAGGSLRLSCAASGRPFSSLDMGWFRQRPGKERDVVATINWTGDYTYYLDSVKGRFTISRDNAKNTVFLQMNSLKPEDTAVYYCAARGGGSSVDSEYDVGEFEYDYWGQGTQVTVS

SEQ ID NO: 1534 - protein, 129 aa, Homo sapiens
MAEVQLVESGGGLVQAGGSLRLSCAASGRPFSSLDMGWFRQRPGKERDVVATINWTGDYTYYLDSVKGRFTISRDNAKNTVFLQMNSLKPEDTAVYYCAARGGGSSVDSEYDVGEFEYDYWGQGPRSPS

SEQ ID NO: 1535 - protein, 130 aa, Homo sapiens
MAEVQLVESGGGLVQAGGSLRLSCAASGRPFSSLDMGWFRQRPGKERDVVATINWTGDSTYYVDSVKGRFTISRDNAKNTVFLQMNSLKPEDTAVYYCAARGGGSSVDSEYDVGEFEYDYWGQGTQVTVS

SEQ ID NO: 1536 - protein, 130 aa, Homo sapiens
MAEVQLVESGGGLVQAGGSLRLSCAASGRPFSSLDMGWFRQRPGKERDVVATINWTGDSTYYLDYVKGRFTISRDNAKNTVFLQMNSLKPEDTAVYYCAARGGGSSVDSEYDVGEFEYDYWGQGTQVTVS

SEQ ID NO: 1537 - protein, 130 aa, Homo sapiens
MAEVQLVESGGGLVQAGGSLRLSCAASGRPFSSLDMGWFRQRPGKERDVVATINWTGDSTYYLDTVKGRFTISRDNAKNTVFLQMNSLKPEDTAVYYCAARGGGSSVDSEYDVGEFEYDYWGQGTQVTVS

SEQ ID NO: 1538 - protein, 130 aa, Homo sapiens
MAEVQLVESGGGLVQAGGSLRLSCAASGRPFSSLDMGWFRQRPGKERDVVATINWTGDSTYYLDSVNGRFTISRDNAKNTVFLQMNSLKPEDTAVYYCAARGGGSSVDSEYDVGEFEYDYWGQGTQVTVS

SEQ ID NO: 1539 - protein, 130 aa, Homo sapiens
MAEVQLVESGGGLVQAGGSLRLSCAASGRPFSSLDMGWFRQRPGKERDVVATINWTGDSTYYLDSVKVRFTISRDNAKNTVFLQMNSLKPEDTAVYYCAARGGGSSVDSEYDVGEFEYDYWGQGTQVTVS

SEQ ID NO: 1540 - protein, 130 aa, Homo sapiens
MAEVQLVESGGGLVQAGGSLRLSCAASGRPFSSLDMGWFRQRPGKERDVVATINWTGDSTYYLDSVKGRSTISRDNAKNTVFLQMNSLKPEDTAVYYCAARGGGSSVDSEYDVGEFEYDYWGQGTQVTVS

SEQ ID NO: 1541 - protein, 130 aa, Homo sapiens
MAEVQLVESGGGLVQAGGSLRLSCAASGRPFSSLDMGWFRQRPGKERDVVATINWTGDSTYYLDSVKGRLTISRDNAKNTVFLQMNSLKPEDTAVYYCAARGGGSSVDSEYDVGEFEYDYWGQGTQVTVS

SEQ ID NO: 1542 - protein, 130 aa, Homo sapiens
MAEVQLVESGGGLVQAGGSLRLSCAASGRPFSSLDMGWFRQRPGKERDVVATINWTGDSTYYLDSVKGRFTTSRDNAKNTVFLQMNSLKPEDTAVYYCAARGGGSSVDSEYDVGEFEYDYWGQGTQVTVS

SEQ ID NO: 1543 - protein, 130 aa, Homo sapiens
MAEVQLVESGGGLVQAGGSLRLSCAASGRPFSSLDMGWFRQRPGKERDVVATINWTGDSTYYLDSVKGRFTITRDNAKNTVFLQMNSLKPEDTAVYYCAARGGGSSVDSEYDVGEFEYDYWGQGTQVTVS

SEQ ID NO: 1544 - protein, 130 aa, Homo sapiens
MAEVQLVESGGGLVQAGGSLRLSCAASGRPFSSLDMGWFRQRPGKERDVVATINWTGDSTYYLDSVKGRFTISSDNAKNTVFLQMNSLKPEDTAVYYCAARGGGSSVDSEYDVGEFEYDYWGQGTQVTVS

SEQ ID NO: 1545 - protein, 130 aa, Homo sapiens
MAEVQLVESGGGLVQAGGSLRLSCAASGRPFSSLDMGWFRQRPGKERDVVATINWTGDSTYYLDSVKGRFTISRNNAKNTVFLQMNSLKPEDTAVYYCAARGGGSSVDSEYDVGEFEYDYWGQGTQVTVS

SEQ ID NO: 1546 - protein, 130 aa, Homo sapiens
MAEVQLVESGGGLVQAGGSLRLSCAASGRPFSSLDMGWFRQRPGKERDVVATINWTGDSTYYLDSVKGRFTISRDNTKNTVFLQMNSLKPEDTAVYYCAARGGGSSVDSEYDVGEFEYDYWGQGTQVTVS

SEQ ID NO: 1547 - protein, 130 aa, Homo sapiens
MAEVQLVESGGGLVQAGGSLRLSCAASGRPFSSLDMGWFRQRPGKERDVVATINWTGDSTYYLDSVKGRFTISRDNSKNTVFLQMNSLKPEDTAVYYCAARGGGSSVDSEYDVGEFEYDYWGQGTQVTVS

SEQ ID NO: 1548 - protein, 130 aa, Homo sapiens
MAEVQLVESGGGLVQAGGSLRLSCAASGRPFSSLDMGWFRQRPGKERDVVATINWTGDSTYYLDSVKGRFTISRDNARNTVFLQMNSLKPEDTAVYYCAARGGGSSVDSEYDVGEFEYDYWGQGTQVTVS

SEQ ID NO: 1549 - protein, 130 aa, Homo sapiens
MAEVQLVESGGGLVQAGGSLRLSCAASGRPFSSLDMGWFRQRPGKERDVVATINWTGDSTYYLDSVKGRFTISRDNAKNTVILQMNSLKPEDTAVYYCAARGGGSSVDSEYDVGEFEYDYWGQGTQVTVS

SEQ ID NO: 1550 - protein, 130 aa, Homo sapiens
MAEVQLVESGGGLVQAGGSLRLSCAASGRPFSSLDMGWFRQRPGKERDVVATINWTGDSTYYLDSVKGRFTISRDNAKNTVFPQMNSLKPEDTAVYYCAARGGGSSVDSEYDVGEFEYDYWGQGTQVTVS

SEQ ID NO: 1551 - protein, 130 aa, Homo sapiens
MAEVQLVESGGGLVQAGGSLRLSCAASGRPFSSLDMGWFRQRPGKERDVVATINWTGDSTYYLDSVKGRFTISRDNAKNTVFLRMNSLKPEDTAVYYCAARGGGSSVDSEYDVGEFEYDYWGQGTQVTVS

SEQ ID NO: 1552 - protein, 130 aa, Homo sapiens
MAEVQLVESGGGLVQAGGSLRLSCAASGRPFSSLDMGWFRQRPGKERDVVATINWTGDSTYYLDSVKGRFTISRDNAKNTVFLQMSSLKPEDTAVYYCAARGGGSSVDSEYDVGEFEYDYWGQGTQVTVS

SEQ ID NO: 1553 - protein, 130 aa, Homo sapiens
MAEVQLVESGGGLVQAGGSLRLSCAASGRPFSSLDMGWFRQRPGKERDVVATINWTGDSTYYLDSVKGRFTISRDNAKNTVFLQMNSRKPEDTAVYYCAARGGGSSVDSEYDVGEFEYDYWGQGTQVTVS

SEQ ID NO: 1554 - protein, 130 aa, Homo sapiens
MAEVQLVESGGGLVQAGGSLRLSCAASGRPFSSLDMGWFRQRPGKERDVVATINWTGDSTYYLDSVKGRFTISRDNAKNTVFLQMNSPKPEDTAVYYCAARGGGSSVDSEYDVGEFEYDYWGQGTQVTVS

SEQ ID NO: 1555 - protein, 130 aa, Homo sapiens
MAEVQLVESGGGLVQAGGSLRLSCAASGRPFSSLDMGWFRQRPGKERDVVATINWTGDSTYYLDSVKGRFTISRDNAKNTVFLQMNSMKPEDTAVYYCAARGGGSSVDSEYDVGEFEYDYWGQGTQVTVS

SEQ ID NO: 1556 - protein, 130 aa, Homo sapiens
MAEVQLVESGGGLVQAGGSLRLSCAASGRPFSSLDMGWFRQRPGKERDVVATINWTGDSTYYLDSVKGRFTISRDNAKNTVFLQMNSLKPGDTAVYYCAARGGGSSVDSEYDVGEFEYDYWGQGTQVTVS

SEQ ID NO: 1557 - protein, 130 aa, Homo sapiens
MAEVQLVESGGGLVQAGGSLRLSCAASGRPFSSLDMGWFRQRPGKERDVVATINWTGDSTYYLDSVKGRFTISRDNAKNTVFLQMNSLKPEDTVVYYCAARGGGSSVDSEYDVGEFEYDYWGQGTQVTVS

SEQ ID NO: 1558 - protein, 130 aa, Homo sapiens
MAEVQLVESGGGLVQAGGSLRLSCAASGRPFSSLDMGWFRQRPGKERDVVATINWTGDSTYYLDSVKGRFTISRDNAKNTVFLQMNSLKPEDTTVYYCAARGGGSSVDSEYDVGEFEYDYWGQGTQVTVS

SEQ ID NO: 1559 - protein, 130 aa, Homo sapiens
MAEVQLVESGGGLVQAGGSLRLSCAASGRPFSSLDMGWFRQRPGKERDVVATINWTGDSTYYLDSVKGRFTISRDNAKNTVFLQMNSLKPEDTDVYYCAARGGGSSVDSEYDVGEFEYDYWGQGTQVTVS

SEQ ID NO: 1560 - protein, 130 aa, Homo sapiens
MAEVQLVESGGGLVQAGGSLRLSCAASGRPFSSLDMGWFRQRPGKERDVVATINWTGDSTYYLDSVKGRFTISRDNAKNTVFLQMNSLKPEDTAVYYCAARGGGSSVDSEYDVGEFKYDYWGQGTQVTVS

SEQ ID NO: 1561 - protein, 130 aa, Homo sapiens
MAEVQLVESGGGLVQAGGSLRLSCAASGRPFSSLDMGWFRQRPGKERDVVATINWTGDSTYYLDSVKGRFTISRDNAKNTVFLQMNSLKPEDTAVYYCAARGGGSSVDSEYDVGEFGYDYWGQGTQVTVS

SEQ ID NO: 1562 - protein, 130 aa, Homo sapiens
MAEVQLVESGGGLVQAGGSLRLSCAASGRPFSSLDMGWFRQRPGKERDVVATINWTGDSTYYLDSVKGRFTISRDNAKNTVFLQMNSLKPEDTAVYYCAARGGGSSVDSEYDVGEFEYGYWGQGTQVTVS

SEQ ID NO: 1563 - protein, 130 aa, Homo sapiens
MAEVQLVESGGGLVQAGGSLRLSCAASGRPFSSLDMGWFRQRPGKERDVVATINWTGDSTYYLDSVKGRFTISRDNAKNTVFLQMNSLKPEDTAVYYCAARGGGSSVDSEYDVGEFEYEYWGQGTQVTVS

SEQ ID NO: 1564 - protein, 130 aa, Homo sapiens
MAEVQLVESGGGLVQAGGSLRLSCAASGRPFSSLDMGWFRQRPGKERDVVATINWTGDSTYYLDSVKGRFTISRDNAKNTVFLQMNSLKPEDTAVYYCAARGGGSSVDSEYDVGEFEYDYWSQGTQVTVS

SEQ ID NO: 1565 - protein, 130 aa, Homo sapiens
MAEVQLVESGGGLVQAGGSLRLSCAASGRPFSSLDMGWFRQRPGKERDVVATINWTGDSTYYLDSVKGRFTISRDNAKNTVFLQMNSLKPEDTAVYYCAARGGGSSVDSEYDVGEFEYDYWGRGTQVTVS

SEQ ID NO: 1566 - protein, 130 aa, Homo sapiens
MAEVQLVESGGGLVQAGGSLRLSCAASGRPFSSLDMGWFRQRPGKERDVVATINWTGDSTYYLDSVKGRFTISRDNAKNTVFLQMNSLKPEDTAVYYCAARGGGSSVDSEYDVGEFEYDYWGQWTQVTVS

SEQ ID NO: 1567 - protein, 130 aa, Homo sapiens
MAEVQLVESGGGLVQAGGSLRLSCAASGRPFSSLDMGWFRQRPGKERDVVATINWTGDSTYYLDSVKGRFTISRDNAKNTVFLQMNSLKPEDTAVYYCAARGGGSSVDSEYDVGEFEYDYWGQVTQVTVS

SEQ ID NO: 1568 - protein, 130 aa, Homo sapiens
MAEVQLVESGGGLVQAGGSLRLSCAASGRPFSSLDMGWFRQRPGKERDVVATINWTGDSTYYLDSVKGRFTISRDNAKNTVFLQMNSLKPEDTAVYYCAARGGGSSVDSEYDVGEFEYDYWGQGTQVTVS

SEQ ID NO: 1569 - protein, 129 aa, Homo sapiens
MAEVQLVESGGGLVQAGGSLRLSCAASGRPFSSLDMGWFRQRPGKERDVVATINWTGDSTYYLDSVKGRFTISRDNAKNTVFLQMNSLKPEDTAVYYCAARGGGSSVDSEYDVGEFEYDYWGQGPRSPS

SEQ ID NO: 1570 - protein, 130 aa, Homo sapiens
MAEVQLVESGGGLVQAGGSLRLSCAASGRPFSSLDMGWFRQRPGKERDVVATINWTGDSTYYLDSVKGRFTISRDNAKNTVFLQMNSLKPEDTAVYYCAARGGGSSVDSEYDVGEFEYDYWGKGTQVTVS

SEQ ID NO: 1571 - protein, 130 aa, Homo sapiens
MAEVQLVESGGGLVQAGGSLRLSCAASGRPFSSLDMGWFRQRPGKERDVVATINWTGDSTYYLDSVKGRFTISRDNAKNTVFLQMNSLKPEDTAVYYCAARGGGSSVDSEYDVGEFEYDYWGHGTQVTVS

SEQ ID NO: 1572 - protein, 130 aa, Homo sapiens
MAEVQLVESGGGLVQAGGSLRLSCAASGRPFSSLDMGWFRQRPGKERDVVATINWTGDSTYYLDSVKGRFTISRDNAKNTVFLQMNSLKPEDTAVYYCAARGGGSSVDSEYDVGEFEYDYWDQGTQVTVS

SEQ ID NO: 1573 - protein, 130 aa, Homo sapiens
MAEVQLVESGGGLVQAGGSLRLSCAASGRPFSSLDMGWFRQRPGKERDVVATINWTGDSTYYLDSVKGRFTISRDNAKNTVFLQMNSLKPEDTAVYYCAARGGGSSVDSEYDVGEFEYDYRGQGTQVTVS

SEQ ID NO: 1574 - protein, 130 aa, Homo sapiens
MAEVQLVESGGGLVQAGGSLRLSCAASGRPFSSLDMGWFRQRPGKERDVVATINWTGDSTYYLDSVKGRFTISRDNAKNTVFLQMNSLKPEDTAVYYCAARGGGSSVDSEYDVGEFEYDYLGQGTQVTVS

SEQ ID NO: 1575 - protein, 130 aa, Homo sapiens
MAEVQLVESGGGLVQAGGSLRLSCAASGRPFSSLDMGWFRQRPGKERDVVATINWTGDSTYYLDSVKGRFTISRDNAKNTVFLQMNSLKPEDTAVYYCAARGGGSSVDSEYDVGEFEYDYGGQGTQVTVS

SEQ ID NO: 1576 - protein, 130 aa, Homo sapiens
MAEVQLVESGGGLVQAGGSLRLSCAASGRPFSSLDMGWFRQRPGKERDVVATINWTGDSTYYLDSVKGRFTISRDNAKNTVFLQMNSLKPEDTAVYYCAARGGGSSVDSEYDVGEFEYDYCGQGTQVTVS

SEQ ID NO: 1577 - protein, 130 aa, Homo sapiens
MAEVQLVESGGGLVQAGGSLRLSCAASGRPFSSLDMGWFRQRPGKERDVVATINWTGDSTYYLDSVKGRFTISRDNAKNTVFLQMNSLKPEDTAVYYCAARGGGSSVDSEYDVGEFEYDDWGQGTQVTVS

SEQ ID NO: 1578 - protein, 130 aa, Homo sapiens
MAEVQLVESGGGLVQAGGSLRLSCAASGRPFSSLDMGWFRQRPGKERDVVATINWTGDSTYYLDSVKGRFTISRDNAKNTVFLQMNSLKPEDTAVYYCAARGGGSSVDSEYDVGEFEDDYWGQGTQVTVS

SEQ ID NO: 1579 - protein, 130 aa, Homo sapiens
MAEVQLVESGGGLVQAGGSLRLSCAASGRPFSSLDMGWFRQRPGKERDVVATINWTGDSTYYLDSVKGRFTISRDNAKNTVFLQMNSLKPEDTAVYYCAARGGGSSVDSEYDVGEFECDYWGQGTQVTVS

SEQ ID NO: 1580 - protein, 130 aa, Homo sapiens
MAEVQLVESGGGLVQAGGSLRLSCAASGRPFSSLDMGWFRQRPGKERDVVATINWTGDSTYYLDSVKGRFTISRDNAKNTVFLQMNSLKPEDTAVYYCAARGGGSSVDSEYDVGEFAYDYWGQGTQVTVS

SEQ ID NO: 1581 - protein, 130 aa, Homo sapiens
MAEVQLVESGGGLVQAGGSLRLSCAASGRPFSSLDMGWFRQRPGKERDVVATINWTGDSTYYLDSVKGRFTISRDNAKNTVFLQMNSLKPEDTAIYYCAARGGGSSVDSEYDVGEFEYDYWGQGTQVTVS

SEQ ID NO: 1582 - protein, 130 aa, Homo sapiens
MAEVQLVESGGGLVQAGGSLRLSCAASGRPFSSLDMGWFRQRPGKERDVVATINWTGDSTYYLDSVKGRFTISRDNAKNTVFLQMNSLKPEDMAVYYCAARGGGSSVDSEYDVGEFEYDYWGQGTQVTVS

SEQ ID NO: 1583 - protein, 130 aa, Homo sapiens
MAEVQLVESGGGLVQAGGSLRLSCAASGRPFSSLDMGWFRQRPGKERDVVATINWTGDSTYYLDSVKGRFTISRDNAKNTVFLQMNSLKPDDTAVYYCAARGGGSSVDSEYDVGEFEYDYWGQGTQVTVS

SEQ ID NO: 1584 - protein, 130 aa, Homo sapiens
MAEVQLVESGGGLVQAGGSLRLSCAASGRPFSSLDMGWFRQRPGKERDVVATINWTGDSTYYLDSVKGRFTISRDNAKNTVFLQMNSLKPADTAVYYCAARGGGSSVDSEYDVGEFEYDYWGQGTQVTVS

SEQ ID NO: 1585 - protein, 130 aa, Homo sapiens
MAEVQLVESGGGLVQAGGSLRLSCAASGRPFSSLDMGWFRQRPGKERDVVATINWTGDSTYYLDSVKGRFTISRDNAKNTVFLQMNSLEPEDTAVYYCAARGGGSSVDSEYDVGEFEYDYWGQGTQVTVS

SEQ ID NO: 1586 - protein, 130 aa, Homo sapiens
MAEVQLVESGGGLVQAGGSLRLSCAASGRPFSSLDMGWFRQRPGKERDVVATINWTGDSTYYLDSVKGRFTISRDNAKNTVFLQMNRLKPEDTAVYYCAARGGGSSVDSEYDVGEFEYDYWGQGTQVTVS

SEQ ID NO: 1587 - protein, 130 aa, Homo sapiens
MAEVQLVESGGGLVQAGGSLRLSCAASGRPFSSLDMGWFRQRPGKERDVVATINWTGDSTYYLDSVKGRFTISRDNAKNTVFLQMNILKPEDTAVYYCAARGGGSSVDSEYDVGEFEYDYWGQGTQVTVS

SEQ ID NO: 1588 - protein, 130 aa, Homo sapiens
MAEVQLVESGGGLVQAGGSLRLSCAASGRPFSSLDMGWFRQRPGKERDVVATINWTGDSTYYLDSVKGRFTISRDNAKNTVFLQMNGLKPEDTAVYYCAARGGGSSVDSEYDVGEFEYDYWGQGTQVTVS

SEQ ID NO: 1589 - protein, 130 aa, Homo sapiens
MAEVQLVESGGGLVQAGGSLRLSCAASGRPFSSLDMGWFRQRPGKERDVVATINWTGDSTYYLDSVKGRFTISRDNAKNTVFLQMDSLKPEDTAVYYCAARGGGSSVDSEYDVGEFEYDYWGQGTQVTVS

SEQ ID NO: 1590 - protein, 130 aa, Homo sapiens
MAEVQLVESGGGLVQAGGSLRLSCAASGRPFSSLDMGWFRQRPGKERDVVATINWTGDSTYYLDSVKGRFTISRDNAKNMVFLQMNSLKPEDTAVYYCAARGGGSSVDSEYDVGEFEYDYWGQGTQVTVS

SEQ ID NO: 1591 - protein, 130 aa, Homo sapiens
MAEVQLVESGGGLVQAGGSLRLSCAASGRPFSSLDMGWFRQRPGKERDVVATINWTGDSTYYLDSVKGRFTISRDNAENTVFLQMNSLKPEDTAVYYCAARGGGSSVDSEYDVGEFEYDYWGQGTQVTVS

SEQ ID NO: 1592 - protein, 130 aa, Homo sapiens
MAEVQLVESGGGLVQAGGSLRLSCAASGRPFSSLDMGWFRQRPGKERDVVATINWTGDSTYYLDSVKGRFTIFRDNAKNTVFLQMNSLKPEDTAVYYCAARGGGSSVDSEYDVGEFEYDYWGQGTQVTVS

SEQ ID NO: 1593 - protein, 130 aa, Homo sapiens
MAEVQLVESGGGLVQAGGSLRLSCAASGRPFSSLDMGWFRQRPGKERDVVATINWTGDSTYYLDSVKGRFSISRDNAKNTVFLQMNSLKPEDTAVYYCAARGGGSSVDSEYDVGEFEYDYWGQGTQVTVS

SEQ ID NO: 1594 - protein, 130 aa, Homo sapiens
MAEVQLVESGGGLVQAGGSLRLSCAASGRPFSSLDMGWFRQRPGKERDVVATINWTGDSTYYLDSVKGRFIISRDNAKNTVFLQMNSLKPEDTAVYYCAARGGGSSVDSEYDVGEFEYDYWGQGTQVTVS

SEQ ID NO: 1595 - protein, 130 aa, Homo sapiens
MAEVQLVESGGGLVQAGGSLRLSCAASGRPFSSLDMGWFRQRPGKERDVVATINWTGDSTYYLDSVKGRFAISRDNAKNTVFLQMNSLKPEDTAVYYCAARGGGSSVDSEYDVGEFEYDYWGQGTQVTVS

SEQ ID NO: 1596 - protein, 130 aa, Homo sapiens
MAEVQLVESGGGLVQAGGSLRLSCAASGRPFSSLDMGWFRQRPGKERDVVATINWTGDSTYYLDSVKGQFTISRDNAKNTVFLQMNSLKPEDTAVYYCAARGGGSSVDSEYDVGEFEYDYWGQGTQVTVS

SEQ ID NO: 1597 - protein, 130 aa, Homo sapiens
MAEVQLVESGGGLVQAGGSLRLSCAASGRPFSSLDMGWFRQRPGKERDVVATINWTGDSTYYLDSVKDRFTISRDNAKNTVFLQMNSLKPEDTAVYYCAARGGGSSVDSEYDVGEFEYDYWGQGTQVTVS

SEQ ID NO: 1598 - protein, 130 aa, Homo sapiens
MAEVQLVESGGGLVQAGGSLRLSCAASGRPFSSLDMGWFRQRPGKERDVVATINWTGDSTYYLDSVKCRFTISRDNAKNTVFLQMNSLKPEDTAVYYCAARGGGSSVDSEYDVGEFEYDYWGQGTQVTVS

SEQ ID NO: 1599 - protein, 130 aa, Homo sapiens
MAEVQLVESGGGLVQAGGSLRLSCAASGRPFSSLDMGWFRQRPGKERDVVATINWTGDSTYYLDSMKGRFTISRDNAKNTVFLQMNSLKPEDTAVYYCAARGGGSSVDSEYDVGEFEYDYWGQGTQVTVS

SEQ ID NO: 1600 - protein, 130 aa, Homo sapiens
MAEVQLVESGGGLVQAGGSLRLSCAASGRPFSSLDMGWFRQRPGKERDVVATINWTGDSTYYLDSGKGRFTISRDNAKNTVFLQMNSLKPEDTAVYYCAARGGGSSVDSEYDVGEFEYDYWGQGTQVTVS

SEQ ID NO: 1601 - protein, 130 aa, Homo sapiens
MAEVQLVESGGGLVQAGGSLRLSCAASGRPFSSLDMGWFRQRPGKERDVVATINWTGDSTYYLDSAKGRFTISRDNAKNTVFLQMNSLKPEDTAVYYCAARGGGSSVDSEYDVGEFEYDYWGQGTQVTVS

SEQ ID NO: 1602 - protein, 130 aa, Homo sapiens
MAEVQLVESGGGLVQAGGSLRLSCAASGRPFSSLDMGWFRQRPGKERDVVATINWTGDSTYYLDPVKGRFTISRDNAKNTVFLQMNSLKPEDTAVYYCAARGGGSSVDSEYDVGEFEYDYWGQGTQVTVS

SEQ ID NO: 1603 - protein, 130 aa, Homo sapiens
MAEVQLVESGGGLVQAGGSLRLSCAASGRPFSSLDMGWFRQRPGKERDVVATINWTGDSTYYFDSVKGRFTISRDNAKNTVFLQMNSLKPEDTAVYYCAARGGGSSVDSEYDVGEFEYDYWGQGTQVTVS

SEQ ID NO: 1604 - protein, 130 aa, Homo sapiens
MAEVQLVESGGGLVQAGGSLRLSCAASGRPFSSLDMGWFRQRPGKERDVVATINWTGDSSYYLDSVKGRFTISRDNAKNTVFLQMNSLKPEDTAVYYCAARGGGSSVDSEYDVGEFEYDYWGQGTQVTVS

SEQ ID NO: 1605 - protein, 130 aa, Homo sapiens
MAEVQLVESGGGLVQAGGSLRLSCAASGRPFSSLDMGWFRQRPGKERDVVATINWTGDRTYYLDSVKGRFTISRDNAKNTVFLQMNSLKPEDTAVYYCAARGGGSSVDSEYDVGEFEYDYWGQGTQVTVS

SEQ ID NO: 1606 - protein, 130 aa, Homo sapiens
MAEVQLVESGGGLVQAGGSLRLSCAASGRPFSSLDMGWFRQRPGKERDVVATINWTGDNTYYLDSVKGRFTISRDNAKNTVFLQMNSLKPEDTAVYYCAARGGGSSVDSEYDVGEFEYDYWGQGTQVTVS

SEQ ID NO: 1607 - protein, 130 aa, Homo sapiens
MAEVQLVESGGGLVQAGGSLRLSCAASGRPFSSLDMGWFRQRPGKERDVVATINWTGDGTYYLDSVKGRFTISRDNAKNTVFLQMNSLKPEDTAVYYCAARGGGSSVDSEYDVGEFEYDYWGQGTQVTVS

SEQ ID NO: 1608 - protein, 130 aa, Homo sapiens
MAEVQLVESGGGLVQAGGSLRLSCAASGRPFSSLDMGWFRQRPGKERDVVATINWTDDSTYYLDSVKGRFTISRDNAKNTVFLQMNSLKPEDTAVYYCAARGGGSSVDSEYDVGEFEYDYWGQGTQVTVS

SEQ ID NO: 1609 - protein, 130 aa, Homo sapiens
MAEVQLVESGGGLVQAGGSLRLSCAASGRPFSSLDMGWFRQRPGKERDVVATINWTCDSTYYLDSVKGRFTISRDNAKNTVFLQMNSLKPEDTAVYYCAARGGGSSVDSEYDVGEFEYDYWGQGTQVTVS

SEQ ID NO: 1610 - protein, 130 aa, Homo sapiens
MAEVQLVESGGGLVQAGGSLRLSCAASGRPFSSLDMGWFRQRPGKERDVVATINWSGDSTYYLDSVKGRFTISRDNAKNTVFLQMNSLKPEDTAVYYCAARGGGSSVDSEYDVGEFEYDYWGQGTQVTVS

SEQ ID NO: 1611 - protein, 130 aa, Homo sapiens
MAEVQLVESGGGLVQAGGSLRLSCAASGRPFSSLDMGWFRQRPGKERDVVATINWAGDSTYYLDSVKGRFTISRDNAKNTVFLQMNSLKPEDTAVYYCAARGGGSSVDSEYDVGEFEYDYWGQGTQVTVS

SEQ ID NO: 1612 - protein, 130 aa, Homo sapiens
MAEVQLVESGGGLVQAGGSLRLSCAASGRPFSSLDMGWFRQAPGKERETVATISWTGGSTYYADSVKGRFTISRDNAKKTVYLQMNSLKPEDTAVYYCAARGGGTSVDSDYDVGEFEYDYWGQGTQVTVS

SEQ ID NO: 1613 - protein, 130 aa, Homo sapiens
MAEVQLVESGGGLVQAGGSLRLSCAASGRPFSSLDMGWFRQAPGKEREFVATLSWTGGSTYYADSVKGRFTISRDNAKNTVYLQMNSLKPEDTAVYYCAARGGGTSVDSDYDVEEFEYDYWGQGTQVTVS

SEQ ID NO: 1614 - protein, 130 aa, Homo sapiens
MAEVQLVESGGGLVQAGGSLRLSCAASGRPFSSLDMGWFRQAPGKEREFVATISWTGGSTYYTDSVKGRFTISRDNAKNTVYLQMNSLKPEDTAVYYCAARGGGTSVDSDYDVEEFEYDYWGQGTQVTVS

SEQ ID NO: 1615 - protein, 130 aa, Homo sapiens
MAEVQLVESGGGLVQAGGSLRLSCAASGRPFSSLDMGWFRQAPGKEREFVATISWTGGSTYYADSVKGRFTISRDNAKNTVYLQMNSQKPEDTAVYYCAARGGGTSVDSDYDVEEFEYDYWGQGTQVTVS

SEQ ID NO: 1616 - protein, 130 aa, Homo sapiens
MAEVQLVESGGGLVQAGGSLRLSCAASGRPFSSLDMGWFRQAPGKEREFVATISWTGGSTYYADSVKGRFTISRDNAKNTVYLQMNSLKPEDTVVYYCAARGGGTSVDSDYDVEEFEYDYWGQGTQVTVS

SEQ ID NO: 1617 - protein, 130 aa, Homo sapiens
MAEVQLVESGGGLVQAGGSLRLSCAASGRPFSSLDMGWFRQAPGKEREFVATISWTGGSTYYADSVKGRFTISRDNAKNTVYLQMNSLKPEDTTVYYCAARGGGTSVDSDYDVEEFEYDYWGQGTQVTVS

SEQ ID NO: 1618 - protein, 130 aa, Homo sapiens
MAEVQLVESGGGLVQAGGSLRLSCAASGRPFSSLDMGWFRQAPGKEREFVATISWTGGSTYYADSVKGRFTISRDNAKNTVYLQMNSLKPEDTAVYYCAARGGGTSVDSDYDVGEFEYDYWGQGTQVTVS

SEQ ID NO: 1619 - protein, 130 aa, Homo sapiens
MAEVQLVESGGGLVQAGGSLRLSCAASGRPFSSLDMGWFRQAPGKEREFVATISWTGGSTYYADSVKGRFTISRDNAKNTVYLQMNSLKPEDTAVYYCAARGGGTSVDSDYDVEEFEYNYWGQGTQVTVS

SEQ ID NO: 1620 - protein, 130 aa, Homo sapiens
MAEVQLVESGGGLVQAGGSLRLSCAASGRPFSSLDMGWFRQAPGKEREFVATISWTGGSTYYADSVKGRFTISRDNAKNTVYLQMNSLKPEDTAVYYCAARGGGTSVDSDYDVEEFEYDYWGQGTQVTVS

SEQ ID NO: 1621 - protein, 129 aa, Homo sapiens
MAEVQLVESGGGLVQAGGSLRLSCAASGRPFSSLDMGWFRQAPGKEREFVATISWTGGSTYYADSVKGRFTISRDNAKNTVYLQMNSLKPEDTAVYYCAARGGGTSVDSDYDVEEFEYDYWGQGPRSPS

SEQ ID NO: 1622 - protein, 130 aa, Homo sapiens
MAEVQLVESGGGLVQAGGSLRLSCAASGRPFSSLDMGWFRQAPGKEREFVATISWTGGSTYYADSVKGRFTISRDNAKNTVYLQMNSLKPEDTAVYYCAARGGGTSVDSDYDVEEFEYDDWGQGTQVTVS

SEQ ID NO: 1623 - protein, 130 aa, Homo sapiens
MAEVQLVESGGGLVQAGGSLRLSCAASGRPFSSLDMGWFRQAPGKEREFVATISWTGGSTYYADSVKGRFTISRDNAKNTVYLQMNSLKPEDTAVYYCAARGGGTSVDSDYDVEEFAYDYWGQGTQVTVS

SEQ ID NO: 1624 - protein, 130 aa, Homo sapiens
MAEVQLVESGGGLVQAGGSLRLSCAASGRPFSSLDMGWFRQAPGKEREFVATISWTGGSTYYADSVKGRFTISRDNAKNTVYLQMNSLKPEDTAVYYCAARGGGSSVDSEYDVGEFEYDYWGQGTQVTVS

SEQ ID NO: 1625 - protein, 130 aa, Homo sapiens
MAEVQLVESGGGLVQAGGSLRLSCAASGRPFSSLDMGWFRQAPGKEREFVATISWTGGSTYYADSVKGRFTISRDNAKNTVYLQMNRLKPEDTAVYYCAARGGGTSVDSDYDVEEFEYDYWGQGTQVTVS

SEQ ID NO: 1626 - protein, 130 aa, Homo sapiens
MAEVQLVESGGGLVQAGGSLRLSCAASGRPFSSLDMGWFRQAPGKEREFVATISWTGGSTYYADSVKGRFAISRDNAKNTVYLQMNSLKPEDTAVYYCAARGGGTSVDSDYDVEEFEYDYWGQGTQVTVS

SEQ ID NO: 1627 - protein, 130 aa, Homo sapiens
MAEVQLVESGGGLVQAGGSLRLSCAASGRPFSSLDMGWFRQAPGKEREFVATISWTGGSTYYADSVKGQFTISRDNAKNTVYLQMNSLKPEDTAVYYCAARGGGTSVDSDYDVEEFEYDYWGQGTQVTVS

SEQ ID NO: 1628 - protein, 130 aa, Homo sapiens
MAEVQLVESGGGLVQAGGSLRLSCAASGRPFSSLDMGWFRQAPGKEREFVATISWTGGSTYYADSMKGRFTISRDNAKNTVYLQMNSLKPEDTAVYYCAARGGGTSVDSDYDVEEFEYDYWGQGTQVTVS

SEQ ID NO: 1629 - protein, 130 aa, Homo sapiens
MAEVQLVESGGGLVQAGGSLRLSCAASGRPFSSLDMGWFRQAPGKEREFVATISWTGGSAYYADSVKGRFTISRDNAKNTVYLQMNSLKPEDTAVYYCAARGGGTSVDSDYDVEEFEYDYWGQGTQVTVS

SEQ ID NO: 1630 - protein, 130 aa, Homo sapiens
MAEVQLVESGGGLVQAGGSLRLSCAASGRPFSSLDMGWFRQAPGKEREFVAAITWTGGSTYYTYSVKGRFTISRDNAKNTVYLQMNSLKPEDTAVYYCAARGGGTSVDNDYDVGEFEYDYWGQGTQVTVS

SEQ ID NO: 1631 - protein, 130 aa, Homo sapiens
MAEVQLVESGGGLVQAGGSLRLSCAASGRPFSSLDMGWFRQAPGKEREFVAAITWTGGSTYYTDSVKGRFTISRDNAKNTVYLQMNSPKPEDTAVYYCAARGGGTSVDNDYDVGEFEYDYWGQGTQVTVS

SEQ ID NO: 1632 - protein, 130 aa, Homo sapiens
MAEVQLVESGGGLVQAGGSLRLSCAASGRPFSSLDMGWFRQAPGKEREFVAAITWTGGSTYYTDSVKGRFTISRDNAKNTVYLQMNSLKSEDTAVYYCAARGGGTSVDNDYDVGEFEYDYWGQGTQVTVS

SEQ ID NO: 1633 - protein, 130 aa, Homo sapiens
MAEVQLVESGGGLVQAGGSLRLSCAASGRPFSSLDMGWFRQAPGKEREFVAAITWTGGSTYYTDSVKGRFTISRDNAKNTVYLQMNSLKPKDTAVYYCAARGGGTSVDNDYDVGEFEYDYWGQGTQVTVS

SEQ ID NO: 1634 - protein, 130 aa, Homo sapiens
MAEVQLVESGGGLVQAGGSLRLSCAASGRPFSSLDMGWFRQAPGKEREFVAAITWTGGSTYYTDSVKGRFTISRDNAKNTVYLQMNSLKPEDTVVYYCAARGGGTSVDNDYDVGEFEYDYWGQGTQVTVS

SEQ ID NO: 1635 - protein, 130 aa, Homo sapiens
MAEVQLVESGGGLVQAGGSLRLSCAASGRPFSSLDMGWFRQAPGKEREFVAAITWTGGSTYYTDSVKGRFTISRDNAKNTVYLQMNSLKPEDTTVYYCAARGGGTSVDNDYDVGEFEYDYWGQGTQVTVS

SEQ ID NO: 1636 - protein, 130 aa, Homo sapiens
MAEVQLVESGGGLVQAGGSLRLSCAASGRPFSSLDMGWFRQAPGKEREFVAAITWTGGSTYYTDSVKGRFTISRDNAKNTVYLQMNSLKPEDTAVYYCAARGGGTSVDSDYDVGEFEYDYWGQGTQVTVS

SEQ ID NO: 1637 - protein, 130 aa, Homo sapiens
MAEVQLVESGGGLVQAGGSLRLSCAASGRPFSSLDMGWFRQAPGKEREFVAAITWTGGSTYYTDSVKGRFTISRDNAKNTVYLQMNSLKPEDTAVYYCAARGGGTSVDNDYDVGEFEYDYWGQGTQVTVS

SEQ ID NO: 1638 - protein, 130 aa, Homo sapiens
MAEVQLVESGGGLVQAGGSLRLSCAASGRPFSSLDMGWFRQAPGKEREFVAAITWTGGSTYYTDSVKGRFTISRDNAKNTVYLQMNSLKPEDTAVYYCAARGGGTSVDNDYDVGEFEYDYWGQETQVTVS

SEQ ID NO: 1639 - protein, 130 aa, Homo sapiens
MAEVQLVESGGGLVQAGGSLRLSCAASGRPFSSLDMGWFRQAPGKEREFVAAITWTGGSTYYTDSVKGRFTISRDNAKNTVYLQMNSLKPEDTAVYYCAARGGGTSVDNDYDVGEFEYDYWDQGTQVTVS

SEQ ID NO: 1640 - protein, 130 aa, Homo sapiens
MAEVQLVESGGGLVQAGGSLRLSCAASGRPFSSLDMGWFRQAPGKEREFVAAITWTGGSTYYTDSVKGRFTISRDNAKNTVYLQMNSLKPEDTAVYYCAARGGGTSVDNDYDVGEFEYDDWGQGTQVTVS

SEQ ID NO: 1641 - protein, 130 aa, Homo sapiens
MAEVQLVESGGGLVQAGGSLRLSCAASGRPFSSLDMGWFRQAPGKEREFVAAITWTGGSTYYTDSVKGRFTISRDNAKNTVYLQMNSLKPEDTAVYYCAARGGGTSVDNDYDVGEFAYDYWGQGTQVTVS

SEQ ID NO: 1642 - protein, 130 aa, Homo sapiens
MAEVQLVESGGGLVQAGGSLRLSCAASGRPFSSLDMGWFRQAPGKEREFVAAITWTGGSTYYTDSVKGRFTISRDNAKNTVYLQMNSLKPEDTAIYYCAARGGGTSVDNDYDVGEFEYDYWGQGTQVTVS

SEQ ID NO: 1643 - protein, 130 aa, Homo sapiens
MAEVQLVESGGGLVQAGGSLRLSCAASGRPFSSLDMGWFRQAPGKEREFVAAITWTGGSTYYTDSVKGRFTISRDNAKNLVYLQMNSLKPEDTAVYYCAARGGGTSVDNDYDVGEFEFDYWGQGTQVTVS

SEQ ID NO: 1644 - protein, 130 aa, Homo sapiens
MAEVQLVESGGGLVQAGGSLRLSCAASGRPFSSLDMGWFRQAPGKEREFVAAITWTGGSTYYTDSMKGRFTISRDNAKNTVYLQMNSLKPEDTAVYYCAARGGGTSVDNDYDVGEFEYDYWGQGTQVTVS

SEQ ID NO: 1645 - protein, 130 aa, Homo sapiens
MAEVQLVESGGGLVQAGGSLRLSCAASGRPFSSLDMGWFRQAPGKERDIVATISWTGGTTYYTDSVKGRFTISRDNAKNTVYLQMNSLKPEDTAVYYCAARGGGTSVDSDYDVGEFEYDYWGQGTQVTVS

SEQ ID NO: 1646 - protein, 130 aa, Homo sapiens
MAEVQLVESGGGLVQAGGSLRLSCAASGRPFSSLDMGWFRQAPGKERDIVATISWTGGTTFYADSVKGRFTISRDNAKNTVYLQMSSLKPEDTAVYYCAARGGGTSVDSDYDVGEFEYDYWGQGTQVTVS

SEQ ID NO: 1647 - protein, 130 aa, Homo sapiens
MAEVQLVESGGGLVQAGGSLRLSCAASGRPFSSLDMGWFRQAPGKERDIVATISWTGGSTYYADSVKGRFTISRDNAKNTVYLQMNSLKPEDTAVYYCAARGGGTSVDSDYDVGEFEYDYWGQGTQVTVS

SEQ ID NO: 1648 - protein, 130 aa, Homo sapiens
MAEVQLVESGGGLVQAGGSLRLSCAASGRPFSSLDMGWFRQAPGKERDIVATISWTGGSTYYADSVKGRFTISRDNAKNTVYLQMNSLKPEDTAVYYCAARGGGTSVDSDYDVGEFDYDYWGQGTQVTVS

SEQ ID NO: 1649 - protein, 130 aa, Homo sapiens
MAEVQLVESGGGLVQAGGSLRLSCAASGRPFSSLDMGWFRQAPGKERDIVATISWTGGSTYYADSVKGRFTISRDNAKNTVYLQMNSLKPEDTAVYYCAARGGGTSVDSDYDVEEFDYDYWGQGTQVTVS

SEQ ID NO: 1650 - protein, 130 aa, Homo sapiens
MAEVQLVESGGGLVQAGGSLRLSCAASGRPFSSLDMGWFRQAPGKERDIVATISWTGGSTYYADSVKGRFTISRDNAKNTVYLQMNNLKPEDTAVYYCAARGGGTSVDSDYDVGEFEYDYWGQGTQVTVS

SEQ ID NO: 1651 - protein, 130 aa, Homo sapiens
MAEVQLVESGGGLVQAGGSLRLSCAASGRPFSSLDMGWFRQAPGKERDIVATISWTGGSTYYADSVKGRFTIFRDNAKNTVYLQMNSLKPEDTAVYYCAARGGGTSVDSDYDVGEFEYDYWGQGTQVTVS

SEQ ID NO: 1652 - protein, 130 aa, Homo sapiens
MAEVQLVESGGGLVQAGGSLRLSCAASGRPFSSLDMGWFRQAPGKERDIVATISWTGGMTYYADSVKGRFTISRDNAKNTVYLQMNSLKPEDTAVYYCAARGGGTSVDSDYDVGEFEYDYWGQGTQVTVS

SEQ ID NO: 1653 - protein, 130 aa, Homo sapiens
MAEVQLVESGGGLVQAGGSLRLSCAASGRPFSSLDMGWFRQAPGKERDIVATISWTGDSTYYADSVKGRFTISRDNAKNTVYLQMNSLKPEDTAVYYCAARGGGTSVDSDYDVGEFEYDYWGQGTQVTVS

SEQ ID NO: 1654 - protein, 130 aa, Homo sapiens
MAEVQLVESGGGLVQAGGSLRLSCAASGRPFSSLDMGWFRQAPGKERDIVATINWTGGSTYYADSVKGRFTISRDNAKNTVYLQMNSLKPEDTAVYYCAARGGGTSVDSDYDVGEFEYDYWGQGTQVTVS

SEQ ID NO: 1655 - protein, 130 aa, Homo sapiens
MAEVQLVESGGGLVQAGGSLRLSCAASGRPFSSLDMGRFRQRPGKERDVVATINWTGDSTYYLDSVKGRFTISRDNAKNTVFLQMNSLKPEDTAVYYCAARGGGSSVDSEYDVGEFEYDYWGQGTQVTVS

SEQ ID NO: 1656 - protein, 130 aa, Homo sapiens
MAEVQLVESGGGLVQAGGSLRLSCAASGRPFSSLDMDWFRQRPGKERDVVATINWTGDSTYYLDSVKGRFTISRDNAKNTVFLQMNSLKPEDTAVYYCAARGGGSSVDSEYDVGEFEYDYWGQGTQVTVS

SEQ ID NO: 1657 - protein, 130 aa, Homo sapiens
MAEVQLVESGGGLVQAGGSLRLSCAASGRPFSSLDMDWFRQAPGKEREFVAAITWTGGSTYYTDSVKGRFTISRDNAKNTVYLQMNSLKPEDTAVYYCAARGGGTSVDNDYDVGEFEYDYWGQGTQVTVS

SEQ ID NO: 1658 - protein, 130 aa, Homo sapiens
MAEVQLVESGGGLVQAGGSLRLSCAASGRPFSSLDMDWFRQAPGKERDIVATISWTGGSTYYADSVKGRFTISRDNAKNTVYLQMNSLKPEDTAVYYCAARGGGTSVDSDYDVGEFEYDYWGQGTQVTVS

SEQ ID NO: 1659 - protein, 130 aa, Homo sapiens
MAEVQLVESGGGLVQAGGSLRLSCAASGRPFSSLDIGWFRQRPGKERDVVATINWTGDSTYYLDSVKGRFTISRDNAKNTVFLQMNSLKPEDTAVYYCAARGGGSSVDSEYDVGEFEYDYWGQGTQVTVS

SEQ ID NO: 1660 - protein, 130 aa, Homo sapiens
MAEVQLVESGGGLVQAGGSLRLSCAASGRPFSSLAMGWFRQRPGKERDVVATINWTGDSTYYLDSVKGRFTISRDNAKNTVFLQMNSLKPEDTAVYYCAARGGGSSVDSEYDVGEFEYDYWGQGTQVTVS

SEQ ID NO: 1661 - protein, 130 aa, Homo sapiens
MAEVQLVESGGGLVQAGGSLRLSCAASGRPFSSLAMGWFRQAPGKEREFVATISWTGGSTYYADSVKGRFTISRDNAKNTVYLQMNSLKPEDTAVYYCAARGGGTSVDSDYDVEEFEYDYWGQGTQVTVS

SEQ ID NO: 1662 - protein, 130 aa, Homo sapiens
MAEVQLVESGGGLVQAGGSLRLSCAASGRPFSSFDMGWFRQRPGKERDVVATINWTGDSTYYLDSVKGRFTISRDNAKNTVFLQMNSLKPEDTAVYYCAARGGGSSVDSEYDVGEFEYDYWGQGTQVTVS

SEQ ID NO: 1663 - protein, 130 aa, Homo sapiens
MAEVQLVESGGGLVQAGGSLRLSCAASGRPFRSLDMGWFRQAPGKEREFVATISWTGGSTYYADSVKGRFTISRDNAKNTVYLQMNSLKPEDTAVYYCAARGGGTSVDSDYDVEEFEYDYWGQGTQVTVS

SEQ ID NO: 1664 - protein, 130 aa, Homo sapiens
MAEVQLVESGGGLVQAGGSLRLSCAASGRPFNMYNMGWFRQALGKEREFVATVSWTGSSTNYADSVKGRFTISRDNAKNTVYLEMNSLKPEDTAVYYCAARGGGTSVDSDYDVGEFEYDYWGQGTQVTVS

SEQ ID NO: 1665 - protein, 130 aa, Homo sapiens
MAEVQLVESGGGLVQAGGSLRLSCAASGRPFNMYDMGWFRQTLGKEREFVATVSWTGSSTNYADSVKGRFTISRDNAKNTVYLEMNSLKPEDTAVYYCAARGGGTSVDSDYDVGEFEYDYWGQGTQVTVS

SEQ ID NO: 1666 - protein, 130 aa, Homo sapiens
MAEVQLVESGGGLVQAGGSLRLSCAASGRPFNMYDMGWFRQDLGKEREFVATVSWTGSSTNYADSVKGRFTISRDNAKNTVYLEMNSLKPEDTAVYYCAARGGGTSVDSDYDVGEFEYDYWGQGTQVTVS

SEQ ID NO: 1667 - protein, 130 aa, Homo sapiens
MAEVQLVESGGGLVQAGGSLRLSCAASGRPFNMYDMGWFRQALGKEREFVSTVSWTGSSTNYADSVKGRFTISRDNAKNTVYLEMNSLKPEDTAVYYCAARGGGTSVDSDYDVGEFEYDYWGQGTQVTVS

SEQ ID NO: 1668 - protein, 130 aa, Homo sapiens
MAEVQLVESGGGLVQAGGSLRLSCAASGRPFNMYDMGWFRQALGKEREFVATVSWTGSSTNYVDSVKGRFTISRDNAKNTVYLEMNSLKPEDTAVYYCAARGGGTSVDSDYDVGEFEYDYWGQGTQVTVS

SEQ ID NO: 1669 - protein, 130 aa, Homo sapiens
MAEVQLVESGGGLVQAGGSLRLSCAASGRPFNMYDMGWFRQALGKEREFVATVSWTGSSTNYTDSVKGRFTISRDNAKNTVYLEMNSLKPEDTAVYYCAARGGGTSVDSDYDVGEFEYDYWGQGTQVTVS

SEQ ID NO: 1670 - protein, 130 aa, Homo sapiens
MAEVQLVESGGGLVQAGGSLRLSCAASGRPFNMYDMGWFRQALGKEREFVATVSWTGSSTNYANSVKGRFTISRDNAKNTVYLEMNSLKPEDTAVYYCAARGGGTSVDSDYDVGEFEYDYWGQGTQVTVS

SEQ ID NO: 1671 - protein, 130 aa, Homo sapiens
MAEVQLVESGGGLVQAGGSLRLSCAASGRPFNMYDMGWFRQALGKEREFVATVSWTGSSTNYADSVNGRFTISRDNAKNTVYLEMNSLKPEDTAVYYCAARGGGTSVDSDYDVGEFEYDYWGQGTQVTVS

SEQ ID NO: 1672 - protein, 130 aa, Homo sapiens
MAEVQLVESGGGLVQAGGSLRLSCAASGRPFNMYDMGWFRQALGKEREFVATVSWTGSSTNYADSVKGRFTISRDNTKNTVYLEMNSLKPEDTAVYYCAARGGGTSVDSDYDVGEFEYDYWGQGTQVTVS

SEQ ID NO: 1673 - protein, 130 aa, Homo sapiens
MAEVQLVESGGGLVQAGGSLRLSCAASGRPFNMYDMGWFRQALGKEREFVATVSWTGSSTNYADSVKGRFTISRDNAKNTVYPEMNSLKPEDTAVYYCAARGGGTSVDSDYDVGEFEYDYWGQGTQVTVS

SEQ ID NO: 1674 - protein, 130 aa, Homo sapiens
MAEVQLVESGGGLVQAGGSLRLSCAASGRPFNMYDMGWFRQALGKEREFVATVSWTGSSTNYADSVKGRFTISRDNAKNTVYLGMNSLKPEDTAVYYCAARGGGTSVDSDYDVGEFEYDYWGQGTQVTVS

SEQ ID NO: 1675 - protein, 130 aa, Homo sapiens
MAEVQLVESGGGLVQAGGSLRLSCAASGRPFNMYDMGWFRQALGKEREFVATVSWTGSSTNYADSVKGRFTISRDNAKNTVYLEMNSPKPEDTAVYYCAARGGGTSVDSDYDVGEFEYDYWGQGTQVTVS

SEQ ID NO: 1676 - protein, 130 aa, Homo sapiens
MAEVQLVESGGGLVQAGGSLRLSCAASGRPFNMYDMGWFRQALGKEREFVATVSWTGSSTNYADSVKGRFTISRDNAKNTVYLEMNSLKPEDTTVYYCAARGGGTSVDSDYDVGEFEYDYWGQGTQVTVS

SEQ ID NO: 1677 - protein, 130 aa, Homo sapiens
MAEVQLVESGGGLVQAGGSLRLSCAASGRPFNMYDMGWFRQALGKEREFVATVSWTGSSTNYADSVKGRFTISRDNAKNTVYLEMNSLKPEDTAVYYCAARGGGTSVDSDYDVGEFGYDYWGQGTQVTVS

SEQ ID NO: 1678 - protein, 130 aa, Homo sapiens
MAEVQLVESGGGLVQAGGSLRLSCAASGRPFNMYDMGWFRQALGKEREFVATVSWTGSSTNYADSVKGRFTISRDNAKNTVYLEMNSLKPEDTAVYYCAARGGGTSVDSDYDVGEFEYDYWVQGTQVTVS

SEQ ID NO: 1679 - protein, 130 aa, Homo sapiens
MAEVQLVESGGGLVQAGGSLRLSCAASGRPFNMYDMGWFRQALGKEREFVATVSWTGSSTNYADSVKGRFTISRDNAKNTVYLEMNSLKPEDTAVYYCAARGGGTSVDSDYDVGEFEYDYWGQRTQVTVS

SEQ ID NO: 1680 - protein, 130 aa, Homo sapiens
MAEVQLVESGGGLVQAGGSLRLSCAASGRPFNMYDMGWFRQALGKEREFVATVSWTGSSTNYADSVKGRFTISRDNAKNTVYLEMNSLKPEDTAVYYCAARGGGTSVDSDYDVGEFEYDYWGQGTQVTVS

SEQ ID NO: 1681 - protein, 129 aa, Homo sapiens
MAEVQLVESGGGLVQAGGSLRLSCAASGRPFNMYDMGWFRQALGKEREFVATVSWTGSSTNYADSVKGRFTISRDNAKNTVYLEMNSLKPEDTAVYYCAARGGGTSVDSDYDVGEFEYDYWGQGPRSPS

SEQ ID NO: 1682 - protein, 130 aa, Homo sapiens
MAEVQLVESGGGLVQAGGSLRLSCAASGRPFNMYDMGWFRQALGKEREFVATVSWTGSSTNYADSVKGRFTISRDNAKNTVYLEMNSLKPEDTAVYYCAARGGGTSVDSDYDVGEFDYDYWGQGTQVTVS

SEQ ID NO: 1683 - protein, 130 aa, Homo sapiens
MAEVQLVESGGGLVQAGGSLRLSCAASGRPFNMYDMGWFRQALGKEREFVATVSWTGSSTNYADSVKGRFTISRDNAKNTVYLEMNSLKPEDMAVYYCAARGGGTSVDSDYDVGEFEYDYWGQGTQVTVS

SEQ ID NO: 1684 - protein, 130 aa, Homo sapiens
MAEVQLVESGGGLVQAGGSLRLSCAASGRPFNMYDMGWFRQALGKEREFVATVSWTGSSTNYADSVKGRFTISRDNAKNTVYLEMNNLKPEDTAVYYCAARGGGTSVDSDYDVGEFEYDYWGQGTQVTVS

SEQ ID NO: 1685 - protein, 130 aa, Homo sapiens
MAEVQLVESGGGLVQAGGSLRLSCAASGRPFNMYDMGWFRQALGKEREFVATVSWTGSSTNYADSVKGRFTISRDNAKNTVYLEMDSLKPEDTAVYYCAARGGGTSVDSDYDVGEFEYDYWGQGTQVTVS

SEQ ID NO: 1686 - protein, 130 aa, Homo sapiens
MAEVQLVESGGGLVQAGGSLRLSCAASGRPFNMYDMGWFRQALGKEREFVATVSWTGSSTNYADSVKGRFTISRDNAKNTVHLEMNSLKPEDTAVYYCAARGGGTSVDSDYDVGEFEYDYWGQGTQVTVS

SEQ ID NO: 1687 - protein, 130 aa, Homo sapiens
MAEVQLVESGGGLVQAGGSLRLSCAASGRPFNMYDMGWFRQALGKEREFVATVSWTGSSTNYADSVKGRFTISRDNAKNTMYLEMNSLKPEDTAVYYCAARGGGTSVDSDYDVGEFEYDYWGQGTQVTVS

SEQ ID NO: 1688 - protein, 130 aa, Homo sapiens
MAEVQLVESGGGLVQAGGSLRLSCAASGRPFNMYDMGWFRQALGKEREFVATVSWTGSSTNYADSVKGRFTISRDNAKNAVYLEMNSLKPEDTAVYYCAARGGGTSVDSDYDVGEFEYDYWGQGTQVTVS

SEQ ID NO: 1689 - protein, 130 aa, Homo sapiens
MAEVQLVESGGGLVQAGGSLRLSCAASGRPFNMYDMGWFRQALGKEREFVATVSWTGSSTNYADSVKDRFTISRDNAKNTVYLEMNSLKPEDTAVYYCAARGGGTSVDSDYDVGEFEYDYWGQGTQVTVS

SEQ ID NO: 1690 - protein, 130 aa, Homo sapiens
MAEVQLVESGGGLVQAGGSLRLSCAASGRPFNMYDMGWFRQALGKEREFVATVSWTGSSTNYADSMKGRFTISRDNAKNTVYLEMNSLKPEDTAVYYCAARGGGTSVDSDYDVGEFEYDYWGQGTQVTVS

SEQ ID NO: 1691 - protein, 130 aa, Homo sapiens
MAEVQLVESGGGLVQAGGSLRLSCAASGRPFNMYDMGWFRQALGKEREFVATVSWTGSNTNYADSVKGRFTISRDNAKNTVYLEMNSLKPEDTAVYYCAARGGGTSVDSDYDVGEFEYDYWGQGTQVTVS

SEQ ID NO: 1692 - protein, 130 aa, Homo sapiens
MAEVQLVESGGGLVQAGGSLRLSCAASGRPFNMYDMGWFRQALGKEHEFVATVSWTGSSTNYADSVKGRFTISRDNAKNTVYLEMNSLKPEDTAVYYCAARGGGTSVDSDYDVGEFEYDYWGQGTQVTVS

SEQ ID NO: 1693 - protein, 130 aa, Homo sapiens
MAEVQLVESGGGLVQAGGSLRLSCAASGRPFNMYDMGWFRQALGKECEFVATVSWTGSSTNYADSVKGRFTISRDNAKNTVYLEMNSLKPEDTAVYYCAARGGGTSVDSDYDVGEFEYDYWGQGTQVTVS

SEQ ID NO: 1694 - protein, 130 aa, Homo sapiens
MAEVQLVESGGGLVQAGGSLRLSCAASGRPFNMYDMGWFHQALGKEREFVATVSWTGSSTNYADSVKGRFTISRDNAKNTVYLEMNSLKPEDTAVYYCAARGGGTSVDSDYDVGEFEYDYWGQGTQVTVS

SEQ ID NO: 1695 - protein, 130 aa, Homo sapiens
MAEVQLVESGGGLVQAGGSLRLSCAASGRPFNMYDMDWFRQALGKEREFVATVSWTGSSTNYADSVKGRFTISRDNAKNTVYLEMNSLKPEDTAVYYCAARGGGTSVDSDYDVGEFEYDYWGQGTQVTVS

SEQ ID NO: 1696 - protein, 130 aa, Homo sapiens
MAEVQLVESGGGLVQAGGSLRLSCAASGRPFNLYDMGWFRQALGKEREFVATVSWTGSSTNYADSVKGRFTISRDNAKNTVYLEMNSLKPEDTAVYYCAARGGGTSVDSDYDVGEFEYDYWGQGTQVTVS

SEQ ID NO: 1697 - protein, 129 aa, Homo sapiens
MAEVQLVESGGGLVQAGGSLRLSCAASGRAFSSYTMGWFHQAPGKEREFVAEISGTGGNTGYADSVKGRFTISRDNAKNTVYLQMNSLKPEDTAVYYCAAVIGSPTDSTDYRSSLDYDYWGQGTQVTVS

SEQ ID NO: 1698 - protein, 130 aa, Homo sapiens
MAEVQLVESGGGLVQAGGSLRLSCAASGRAFSSLDMGWFRQRPGKERDVVATINWTGDSTYYLDSVKGRFTISRDNAKNTVFLQMNSLKPEDTAVYYCAARGGGSSVDSEYDVGEFEYDYWGQGTQVTVS

SEQ ID NO: 1699 - protein, 129 aa, Homo sapiens
MAEVQLVESGGGLVQAGGSLRLSCAASGRAFNTYTMGWFRQAPGLERDFVAEISWSGGSTGYADSVKGRFTISRDNAKNTVYLQMNSLKPQDTAVYYCAAVIGSPTDYSDYRSSLDYDYWGQGTQVTVS

SEQ ID NO: 1700 - protein, 127 aa, Homo sapiens
MAEVQLVESGGGLVQAGGSLRLSCAASGRAFDRYTMAWFRQGPGKEREFVATVGWNDNSIYYADSVKGRFTISRDNAKNTVYLQMNSLKPEDTAVYYCAATFGSPVDTPLDRGAYDFWGQGTQVTVS

SEQ ID NO: 1701 - protein, 129 aa, Homo sapiens
MAEVQLVESGGGLVQAGGSLRLSCAASGPTFSSYTMGWFRQAPGLERDFVAEIGWSGGSTGYADSVKGRFTISRDNAKNTVYLQMNSLKPQDTAVYYCAAVIGSPTDYSDYRSSLDYDYWGQGTQVTVS

SEQ ID NO: 1702 - protein, 129 aa, Homo sapiens
MAEVQLVESGGGLVQAGGSLRLSCAASGPSMNWYGMAWFRQSPGKERELVADVSWSGGSTYYRDSVKGRFTISRDNAKNTVYLQMNGLKPEDTAVYYCAARTSSSVDPWNYVGVGDYDYWGQGTQVTVS

SEQ ID NO: 1703 - protein, 130 aa, Homo sapiens
MAEVQLVESGGGLVQAGGSLRLSCAASGLPFSSLDMGWFRQRPGKERDVVATINWTGDSTYYLDSVKGRFTISRDNAKNTVFLQMNSLKPEDTAVYYCAARGGGSSVDSEYDVGEFEYDYWGQGTQVTVS

SEQ ID NO: 1704 - protein, 129 aa, Homo sapiens
MAEVQLVESGGGLVQAGGSLRLSCAASGHTFSSYTMGWFHQAPGKEREFVAEISGTGGNTGYADSVKGRFTISRDNAKNTMYLQMNSLKPEDTAVYYCAAVIGSPTDSSDYRSSLDYDYWGQGTQVTVS

SEQ ID NO: 1705 - protein, 129 aa, Homo sapiens
MAEVQLVESGGGLVQAGGSLRLSCAASGHTFSSYTMGWFHQAPGKEREFVAEISGTGGNTGYADSVKGRFTISRDNAKNMVYLQMNSLKPEDTAVYYCAAVIGSPTDSSDYRSSLDYDYWGQGTQVTVS

SEQ ID NO: 1706 - protein, 129 aa, Homo sapiens
MAEVQLVESGGGLVQAGGSLRLSCAASGHTFSNYTMGWFHQAPGKEREFVAEISGTGGNTGYADSVKGRFTISRDNAKNTVYLQMNSLKPEDTAVYYCAAVIGSPTDSSDYRSSLDYDYWGQGTQVTVS

SEQ ID NO: 1707 - protein, 127 aa, Homo sapiens
MAEVQLVESGGGLVQAGGSLRLSCAASGGTFSTYTMAWFRQAPGKEREFVAAISWSGAYYAESVKGRFTISRDNAKNTVYLQMNSLKPEDTAVYYCAAVIGSTVDSYSPSDPLEYDYWGQGTQVTVS

SEQ ID NO: 1708 - protein, 130 aa, Homo sapiens
MAEVQLVESGGGLVQAGGSLRLSCAASGFTLDYYGIGWFRQAPGKEREGVSCIDSSGGSTFYADSVKGRFTISRDNAKNTLYLQMNSLKPEDTAVYYCAAVLGDSVDYGMGYCNLDEYDYWGQGTQVTVS

SEQ ID NO: 1709 - protein, 123 aa, Homo sapiens
MAEVQLVESGGGLVQAGGSLRLSCAASGFTFSTYAMGWVRQAPGKGPEWVATIYSKGDTTHYANSAKGRFTISRDNARNTLYLQMNSLKPEDTAVYYCAKGISDSYLRVESNYRGQGTQVTVS

SEQ ID NO: 1710 - protein, 127 aa, Homo sapiens
MAEVQLVESGGGLVQAGGSLRLSCAAAGRTSSDYAMGWFRQAPGKEREFVAAVNWSGVSTYYADSVKGRFTISRDNAKNTVHLQMNSLKPEDTAVYYCAAEKLESLRNWHDPLMYDYWGQGTQVTVS

SEQ ID NO: 1711 - protein, 127 aa, Homo sapiens
MAEVQLVESGGGLVQAGGSLRLSCAAAGRTSSDYAMGWFRQAPGKEREFVAAINWSGISTYYADSVKGRFTISRDNAKNTVHLQMNSLKPEDTAVYYCAAEKLESLREWHDPLMYDYWGQGTQVTVS

SEQ ID NO: 1712 - protein, 127 aa, Homo sapiens
MAEVQLVESGGGLVQAGGSLRLSCAAAGRTSSDYAMGWFRQAPGEERVFVAAINWSGISTYYADSVKGRFTISRDNAKNTVHLQMNSLKPEDTAVYYCAAEKLESLRNWHDPLMYDYWGQGTQVTVS

SEQ ID NO: 1713 - protein, 127 aa, Homo sapiens
MAEVQLVESGGGLVQAGGSLRLSCAAAGRTRSDYAMGWFRQAPGKEREFVSAINWSGISTYYADSVKGRFTISRDNAKNTVHLQMNSLKPEDTAVYYCAAEKLESLRNWHDPLMYDYWGQGTQVTVS

SEQ ID NO: 1714 - protein, 127 aa, Homo sapiens
MAEVQLVESGGGLVQAGGSLMLSCAATRRTSNDYAMGWFRQAPGKEREFVAAINWSGISTYYADSVKGRFTISRDSAKNTVHLQMNSLKPEDTAVYYCAAEKLESLRNWHDPLMYDYWGQGTQVTVS

SEQ ID NO: 1715 - protein, 127 aa, Homo sapiens
MAEVQLVESGGGLVQAGGSLMLSCAAARRTSNDYAMGWFRQAPGKEREFVAAINWSGISTYYADSVKGRFTISRDSAKNTVHLQMNSLKPEDTAVYYCAAEKLESLRNWHDPLMYDYWGQGTQVTVS

SEQ ID NO: 1716 - protein, 127 aa, Homo sapiens
MAEVQLVESGGGLVQAGGSLMLSCAAAGRTSNDYAMGWFRQAPGKEREFVAAINWSGISTYYADSVKGRFTISRDNAKNTVHLQMNSLKPEDTAVYYCAAEKLESLRMWHDPLMYDYWGQGTQVTVS

SEQ ID NO: 1717 - protein, 130 aa, Homo sapiens
MAEVQLVESGGGLVQAGGSLKLSCAASGRPFNMYDMGWFRQALGKEREFVATVSWTGSSTNYADSVKGRFTISRDNAKNTVYLEMNSLKPEDTAVYYCAARGGGTSVDSDYDVGEFEYDYWGQGTQVTVS

SEQ ID NO: 1718 - protein, 130 aa, Homo sapiens
MAEVQLVESGGGLVQAGGSLGLSCAASGRPFSSLDMGWFRQRPGKERDVVATINWTGDSTYYLDSVKGRFTISRDNAKNTVFLQMNSLKPEDTAVYYCAARGGGSSVDSEYDVGEFEYDYWGQGTQVTVS

SEQ ID NO: 1719 - protein, 130 aa, Homo sapiens
MAEVQLVESGGGLVQAGGPLRLSCAASGRPFSSLDMGWFRQRPGKERDVVATINWTGDSTYYLDSVKGRFTISRDNAKNTVFLQMNSLKPEDTAVYYCAARGGGSSVDSEYDVGEFEYDYWGQGTQVTVS

SEQ ID NO: 1720 - protein, 133 aa, Homo sapiens
MAEVQLVESGGGLVQAGDSLRLSCVASVASGRTFGWYDMGWFRQAPGKEREFVAAISWSGGSTYYADSVKGRSTISRDNAKNTVYLQMNSLKPEDTAVYYCAARGGGTSVDSDYDVGEFEYDYWGQGTQVTVS

SEQ ID NO: 1721 - protein, 129 aa, Homo sapiens
MAEVQLVESGGGLVQAGDSLRLSCVASGRTFSYYGMGWFRQAPGKERDFVAAISWSGGSTYYEDSVKGRFTISRDNAKNTVYLQMNSLKPEDTAVYYCAGAFGSTVDNYDHSDPREYDSWGQGTQVTVS

SEQ ID NO: 1722 - protein, 127 aa, Homo sapiens
MAEVQLVESGGGLVQAGDSLRLSCTASGRTFSTYTMAWFRQAPGKEREFVAAISWSGTYYADSVKGRFTISRDNAKNTVYLQMNSLKPEDTAVYYCAAVIGSTVDTYSPSDPLAYDYWGQGTQVTVS

SEQ ID NO: 1723 - protein, 127 aa, Homo sapiens
MAEVQLVESGGGLVQAGDSLRLSCTASGRTFSTYTMAWFRQAPGKEREFVAAISWSGTYYADSVKGRFTISRDNAKNTVYLQMNSLKPEDTAVYYCAAVIGSTVDTYSPSDHLEYDYWGQGTQVTVS

SEQ ID NO: 1724 - protein, 127 aa, Homo sapiens
MAEVQLVESGGGLVQAGDSLRLSCTASGRTFSTYTMAWFRQAPGKEREFVAAISWSGTYYADSVKGRFTISRDNAKNTVYLQMNSLKPEDTAVYYCAAVIGSTVDTYNPSDPLEYDYWGQGTQVTVS

SEQ ID NO: 1725 - protein, 127 aa, Homo sapiens
MAEVQLVESGGGLVQAGDSLRLSCTASGRTFSTYTMAWFRQAPGKEREFVAAISWSGTYYADSVKGRFTISRDNAKNTVYLQMNSLKPEDTAVYYCAAVIGSTVDSYSPSDPLEYDYWGQGTQVTVS

SEQ ID NO: 1726 - protein, 127 aa, Homo sapiens
MAEVQLVESGGGLVQAGDSLRLSCTASGRTFSTYTMAWFRQAPGKEREFVAAISWSGTYYADSVKGRFTISRDNAKNTVYLQMNSLKPEDTAVYYCAAVIGSTIDTYSPSDPLEYDYWGQGTQVTVS

SEQ ID NO: 1727 - protein, 127 aa, Homo sapiens
MAEVQLVESGGGLVQAGDSLRLSCTASGRTFSTYTMAWFRQAPGKEREFVAAISWSGAYYAESVKGRFTISRDNAKNTVYLQMNSLKPEDTAVYYCAAVIGSTVDSYSPSDPLEYDYWGQGTQVTVS

SEQ ID NO: 1728 - protein, 127 aa, Homo sapiens
MAEVQLVESGGGLVQAGDSLRLSCTASGRTFSTYTMAWFRQAPGKERDFVAAISWSGAYYADSVKGRFTISRDNAKNTVYLQMNSLKPEDTAVYYCAAVIGSTVDSYSPSDPLDYDYWGQGTQVTVS

SEQ ID NO: 1729 - protein, 129 aa, Homo sapiens
MAEVQLVESGGGLVQAGDSLRLSCAASGRTFSTYTMGWFRQAPGKEREFVAHINWSGSSTYYVDSVKGRFTISRDNAKNTMYLQMNSLKPDDTAVYYCAVTIGSPVDSYRHSDPLEYDYWGQGTQVTVS

SEQ ID NO: 1730 - protein, 129 aa, Homo sapiens
MAEVQLVESGGGLVQAGDSLRLSCAASGRTFSTYTMGWFRQAPGKEREFVAHINWSGSSTYYADSVKGRFTISRDNAKNTMYLQMNSPKPDDTAVYYCAVTIGSPVDSYRHSDPLEYDYWGQGTQVTVS

SEQ ID NO: 1731 - protein, 129 aa, Homo sapiens
MAEVQLVESGGGLVQAGDSLRLSCAASGRTFSTYTMGWFRQAPGKEREFVAHINWSGSSTYYADSVKGRFTISRDNAKNTMYLQMNSLKPEDTAVYYCAVTIGSPVDSYRHSDPLEYDYWGQGTQVTVS

SEQ ID NO: 1732 - protein, 129 aa, Homo sapiens
MAEVQLVESGGGLVQAGDSLRLSCAASGRTFSTYTMGWFRQAPGKEREFVAHINWSGSSTYYADSVKGRFTISRDNAKNTMYLQMNSLKPDDTTVYYCAVTIGSPVDSYRHSDPLEYDYWGQGTQVTVS

SEQ ID NO: 1733 - protein, 129 aa, Homo sapiens
MAEVQLVESGGGLVQAGDSLRLSCAASGRTFSTYTMGWFRQAPGKEREFVAHINWSGSSTYYADSVKGRFTISRDNAKNTMYLQMNSLKPDDTAVYYCAVTIGSPVDSYRHSDPLEYDYWGQGTQVTVS

SEQ ID NO: 1734 - protein, 130 aa, Homo sapiens
MAEVQLVESGGGLVQAGDSLRLSCAASGRPFSSLDMGWFRQRPGKERDVVATINWTGDSTYYLDSVKGRFTISRDNAKNTVFLQMNSLKPEDTAVYYCAARGGGSSVDSEYDVGEFEYDYWGQGTQVTVS

SEQ ID NO: 1735 - protein, 130 aa, Homo sapiens
MAEVQLVESGGGLVQAGDSLRLSCAASGRPFSSLDMGWFRQAPGKEREFVATISWTGGSTYYADSVKGRFTISRDNAKNTVYLQMNSLKPEDTAVYYCAARGGGTSVDSDYDVEEFEYDYWGQGTQVTVS

SEQ ID NO: 1736 - protein, 130 aa, Homo sapiens
MAEVQLVESGGGLVQAGDSLRLSCAASGRPFSSLDMGWFRQAPGKEREFVAAITWTGGSTYYTDSVKGRFTISRDNAKNTVYLQMNSLKPEDTAVYYCAARGGGTSVDNDYDVGEFEYDYWGQGTQVTVS

SEQ ID NO: 1737 - protein, 130 aa, Homo sapiens
MAEVQLVESGGGLVQAGDSLRLSCAASGRPFNMYDMGWFRQALGKEREFVATVSWTGSSTNYADSVKGRFTISRDNAKNTVYLEMNSLKPEDTAVYYCAARGGGTSVDSDYDVGEFEYDYWGQGTQVTVS

SEQ ID NO: 1738 - protein, 127 aa, Homo sapiens
MAEVQLVESGGGLVQAGDSLRLSCAASGITFRWYTMAWFRQAPGKERDFVATINWSGSDTNYADSVKGRFTISRDNAKNTVTLQMNSLQPEDTAVYYCAGVPGTSLSGETDPRDYDYWGQGTQVTVS

SEQ ID NO: 1739 - protein, 130 aa, Homo sapiens
MAEVQLVESGGGLVQAGCSLRLSCAASGRPFSSLDMGWFRQRPGKERDVVATINWTGDSTYYLDSVKGRFTISRDNAKNTVFLQMNSLKPEDTAVYYCAARGGGSSVDSEYDVGEFEYDYWGQGTQVTVS

SEQ ID NO: 1740 - protein, 129 aa, Homo sapiens
MAEVQLVESGGGLVQAGASLRLSCVASGGTFSSYAMAWFRQAPGKEREFVAEDSWSNHRVWYSDSVKGRFTISRDNAKNTVYLQMNNLKPEDTAVYYCAAYRDYSGSTVDPPNQSEYDYWGQGTQVTVS

SEQ ID NO: 1741 - protein, 129 aa, Homo sapiens
MAEVQLVESGGGLVQAGASLRLSCAASGGTFSSYVMAWFRQAPGKEREFVAEDSWSNHRVWYSDSVKGRFTISRDNAKNTVYLQMNNLKPEDTAVYYCAAYRDYSGSTVDPPNQSEYDYWGQGTQVTVS

SEQ ID NO: 1742 - protein, 129 aa, Homo sapiens
MAEVQLVESGGGLVQAGASLRLSCAASGGTFSSYAVAWFRQAPGKEREFVAEDSWSNHRVWYSDSVKGRFTISRDNAKNTVYLQMNNLKPEDTAVYYCAAYRDYSGSTVDPPNQSEYDYWGQGTQVTVS

SEQ ID NO: 1743 - protein, 129 aa, Homo sapiens
MAEVQLVESGGGLVQAGASLRLSCAASGGTFSSYAMVWFRQAPGKEREFVAEDSWSNHRVWYSDSVKGRFTISRDNAKNTVYLQMNNLKPEDTAVYYCAAYRDYSGSTVDPPNQSEYDYWGQGTQVTVS

SEQ ID NO: 1744 - protein, 129 aa, Homo sapiens
MAEVQLVESGGGLVQAGASLRLSCAASGGTFSSYAMTWFRQAPGKEREFVAEDSWSNHRVWYSDSVKGRFTISRDNAKNTVYLQMNNLKPEDTAVYYCAAYRDYSGSTVDPPNQSEYDYWGQGTQVTVS

SEQ ID NO: 1745 - protein, 129 aa, Homo sapiens
MAEVQLVESGGGLVQAGASLRLSCAASGGTFSSYAMSWFRQAPGKEREFVAEDSWSNHRVWYSDSVKGRFTISRDNAKNTVYLQMNNLKPEDTAVYYCAAYRDYSGSTVDPPNQSEYDYWGQGTQVTVS

SEQ ID NO: 1746 - protein, 129 aa, Homo sapiens
MAEVQLVESGGGLVQAGASLRLSCAASGGTFSSYAMAWSRQAPGKEREFVAEDSWSNHRVWYSDSVKGRFTISRDNAKNTVYLQMNNLKPEDTAVYYCAAYRDYSGSTVDPPNQSEYDYWGQGTQVTVS

SEQ ID NO: 1747 - protein, 129 aa, Homo sapiens
MAEVQLVESGGGLVQAGASLRLSCAASGGTFSSYAMAWFRQAPGKEREIVAEDSWSNHRVWYSDSVKGRFTISRDNAKNTVYLQMNNLKPEDTAVYYCAAYRDYSGSTVDPPNQSEYDYWGQGTQVTVS

SEQ ID NO: 1748 - protein, 129 aa, Homo sapiens
MAEVQLVESGGGLVQAGASLRLSCAASGGTFSSYAMAWFRQAPGKEREFVAEDSWSNYRVWYSDSVKGRFTISRDNAKNTVYLQMNNLKPEDTAVYYCAAYRDYSGSTVDPPNQSEYDYWGQGTQVTVS

SEQ ID NO: 1749 - protein, 129 aa, Homo sapiens
MAEVQLVESGGGLVQAGASLRLSCAASGGTFSSYAMAWFRQAPGKEREFVAEDSWSNHRVWYSDSVNGRFTISRDNAKNTVYLQMNNLKPEDTAVYYCAAYRDYSGSTVDPPNQSEYDYWGQGTQVTVS

SEQ ID NO: 1750 - protein, 129 aa, Homo sapiens
MAEVQLVESGGGLVQAGASLRLSCAASGGTFSSYAMAWFRQAPGKEREFVAEDSWSNHRVWYSDSVKGRFTISRDNTKNTVYLQMNNLKPEDTAVYYCAAYRDYSGSTVDPPNQSEYDYWGQGTQVTVS

SEQ ID NO: 1751 - protein, 129 aa, Homo sapiens
MAEVQLVESGGGLVQAGASLRLSCAASGGTFSSYAMAWFRQAPGKEREFVAEDSWSNHRVWYSDSVKGRFTISRDNAKNTVYPQMNNLKPEDTAVYYCAAYRDYSGSTVDPPNQSEYDYWGQGTQVTVS

SEQ ID NO: 1752 - protein, 129 aa, Homo sapiens
MAEVQLVESGGGLVQAGASLRLSCAASGGTFSSYAMAWFRQAPGKEREFVAEDSWSNHRVWYSDSVKGRFTISRDNAKNTVYLQMSNLKPEDTAVYYCAAYRDYSGSTVDPPNQSEYDYWGQGTQVTVS

SEQ ID NO: 1753 - protein, 129 aa, Homo sapiens
MAEVQLVESGGGLVQAGASLRLSCAASGGTFSSYAMAWFRQAPGKEREFVAEDSWSNHRVWYSDSVKGRFTISRDNAKNTVYLQMNNLKPEDTAVYYCASYRDYSGSTVDPPNQSEYDYWGQGTQVTVS

SEQ ID NO: 1754 - protein, 129 aa, Homo sapiens
MAEVQLVESGGGLVQAGASLRLSCAASGGTFSSYAMAWFRQAPGKEREFVAEDSWSNHRVWYSDSVKGRFTISRDNAKNTVYLQMNNLKPEDTAVYYCADYRDYSGSTVDPPNQSEYDYWGQGTQVTVS

SEQ ID NO: 1755 - protein, 129 aa, Homo sapiens
MAEVQLVESGGGLVQAGASLRLSCAASGGTFSSYAMAWFRQAPGKEREFVAEDSWSNHRVWYSDSVKGRFTISRDNAKNTVYLQMNNLKPEDTAVYYCAAYRDYSGSTVDPPNQSEYGYWGQGTQVTVS

SEQ ID NO: 1756 - protein, 129 aa, Homo sapiens
MAEVQLVESGGGLVQAGASLRLSCAASGGTFSSYAMAWFRQAPGKEREFVAEDSWSNHRVWYSDSVKGRFTISRDNAKNTVYLQMNNLKPEDTAVYYCAAYRDYSGSTVDPPNQSEYDYWGRGTQVTVS

SEQ ID NO: 1757 - protein, 128 aa, Homo sapiens
MAEVQLVESGGGLVQAGASLRLSCAASGGTFSSYAMAWFRQAPGKEREFVAEDSWSNHRVWYSDSVKGRFTISRDNAKNTVYLQMNNLKPEDTAVYYCAAYRDYSGSTVDPPNQSEYDYWGQGPRSPS

SEQ ID NO: 1758 - protein, 129 aa, Homo sapiens
MAEVQLVESGGGLVQAGASLRLSCAASGGTFSSYAMAWFRQAPGKEREFVAEDSWSNHRVWYSDSVKGRFTISRDNAKNTVYLQMNNLKPEDTAVYYCAAYRDYSGSTVDPPNQSEYDYWDQGTQVTVS

SEQ ID NO: 1759 - protein, 129 aa, Homo sapiens
MAEVQLVESGGGLVQAGASLRLSCAASGGTFSSYAMAWFRQAPGKEREFVAEDSWSNHRVWYSDSVKGRFTISRDNAKNTVYLQMNNLKPEDTAVYYCAAYRDYSGSTVDPPNQSEYDDWGQGTQVTVS

SEQ ID NO: 1760 - protein, 129 aa, Homo sapiens
MAEVQLVESGGGLVQAGASLRLSCAASGGTFSSYAMAWFRQAPGKEREFVAEDSWSNHRVWYSDSVKGRFTISRDNAKNTVYLQMNNLKPEDTAVYYCAAYCDYSGSTVDPPNQSEYDYWGQGTQVTVS

SEQ ID NO: 1761 - protein, 129 aa, Homo sapiens
MAEVQLVESGGGLVQAGASLRLSCAASGGTFSSYAMAWFRQAPGKEREFVAEDSWSNHRVWYSDSVKGRFTISRDNAKNTVYLQMNNLKPEDTAVYCCAAYRDYSGSTVDPPNQSEYDYWGQGTQVTVS

SEQ ID NO: 1762 - protein, 129 aa, Homo sapiens
MAEVQLVESGGGLVQAGASLRLSCAASGGTFSSYAMAWFRQAPGKEREFVAEDSWSNHRVWYSDSVKGRFTISRDNAKNTVYLQMNNLKHEDTAVYYCAAYRDYSGSTVDPPNQSEYDYWGQGTQVTVS

SEQ ID NO: 1763 - protein, 129 aa, Homo sapiens
MAEVQLVESGGGLVQAGASLRLSCAASGGTFSSYAMAWFRQAPGKEREFVAEDSWSNHRVWYSDSVKGRFTISRDNAKNTVCLQMNNLKPEDTAVYYCAAYRDYSGSTVDPPNQSEYDYWGQGTQVTVS

SEQ ID NO: 1764 - protein, 129 aa, Homo sapiens
MAEVQLVESGGGLVQAGASLRLSCAASGGTFSSYAMAWFRQAPGKEREFVAEDSWSNHRVWYSDSVKGRFTISRDNAENTVYLQMNNLKPEDTAVYYCAAYRDYSGSTVDPPNQSEYDYWGQGTQVTVS

SEQ ID NO: 1765 - protein, 129 aa, Homo sapiens
MAEVQLVESGGGLVQAGASLRLSCAASGGTFSSYAMAWFRQAPGKEREFVAEDSWSNHRVWYSDSVKGRFTIARDNAKNTVYLQMNNLKPEDTAVYYCAAYRDYSGSTVDPPNQSEYDYWGQGTQVTVS

SEQ ID NO: 1766 - protein, 129 aa, Homo sapiens
MAEVQLVESGGGLVQAGASLRLSCAASGGTFSSYAMAWFRQAPGKEREFVAEDSWSNHRVWYSDSVKDRFTISRDNAKNTVYLQMNNLKPEDTAVYYCAAYRDYSGSTVDPPNQSEYDYWGQGTQVTVS

SEQ ID NO: 1767 - protein, 129 aa, Homo sapiens
MAEVQLVESGGGLVQAGASLRLSCAASGGTFSSYAMAWFRQAPGKEREFVAEDSWSNHRVWYSDSVEGRFTISRDNAKNTVYLQMNNLKPEDTAVYYCAAYRDYSGSTVDPPNQSEYDYWGQGTQVTVS

SEQ ID NO: 1768 - protein, 129 aa, Homo sapiens
MAEVQLVESGGGLVQAGASLRLSCAASGGTFSSYAMAWFRQAPGKEREFVAEDSWSNHRVRYSDSVKGRFTISRDNAKNTVYLQMNNLKPEDTAVYYCAAYRDYSGSTVDPPNQSEYDYWGQGTQVTVS

SEQ ID NO: 1769 - protein, 129 aa, Homo sapiens
MAEVQLVESGGGLVQAGASLRLSCAASGGTFSSYAMAWFRQAPGKEREFVAEDSWSNHMVWYSDSVKGRFTISRDNAKNTVYLQMNNLKPEDTAVYYCAAYRDYSGSTVDPPNQSEYDYWGQGTQVTVS

SEQ ID NO: 1770 - protein, 129 aa, Homo sapiens
MAEVQLVESGGGLVQAGASLRLSCAASGGTFSSYAMAWFRQAPGKEREFVAEDSRSNHRVWYSDSVKGRFTISRDNAKNTVYLQMNNLKPEDTAVYYCAAYRDYSGSTVDPPNQSEYDYWGQGTQVTVS

SEQ ID NO: 1771 - protein, 129 aa, Homo sapiens
MAEVQLVESGGGLVQAGASLRLSCAASGGTFSSYAMAWFRQAPGKECEFVAEDSWSNHRVWYSDSVKGRFTISRDNAKNTVYLQMNNLKPEDTAVYYCAAYRDYSGSTVDPPNQSEYDYWGQGTQVTVS

SEQ ID NO: 1772 - protein, 129 aa, Homo sapiens
MAEVQLVESGGGLVQAGASLRLSCAASGGTFSSYAMAWFRQAPGEEREFVAEDSWSNHRVWYSDSVKGRFTISRDNAKNTVYLQMNNLKPEDTAVYYCAAYRDYSGSTVDPPNQSEYDYWGQGTQVTVS

SEQ ID NO: 1773 - protein, 129 aa, Homo sapiens
MAEVQLVESGGGLVQAGASLRLSCAASGGTFSSYAMAWFHQAPGKEREFVAEDSWSNHRVWYSDSVKGRFTISRDNAKNTVYLQMNNLKPEDTAVYYCAAYRDYSGSTVDPPNQSEYDYWGQGTQVTVS

SEQ ID NO: 1774 - protein, 129 aa, Homo sapiens
MAEVQLVESGGGLVQAGASLRLSCAASGGTFSSYAMARFRQAPGKEREFVAEDSWSNHRVWYSDSVKGRFTISRDNAKNTVYLQMNNLKPEDTAVYYCAAYRDYSGSTVDPPNQSEYDYWGQGTQVTVS

SEQ ID NO: 1775 - protein, 129 aa, Homo sapiens
MAEVQLVESGGGLVQAGASLRLSCAASGGTFSSYAIAWFRQAPGKEREFVAEDSWSNHRVWYSDSVKGRFTISRDNAKNTVYLQMNNLKPEDTAVYYCAAYRDYSGSTVDPPNQSEYDYWGQGTQVTVS

SEQ ID NO: 1776 - protein, 129 aa, Homo sapiens
MAEVQLVESGGGLVQAGASLRLSCAASGGTFGSYAMAWFRQAPGKEREFVAEDSWSNHRVWYSDSVKGRFTISRDNAKNTVYLQMNNLKPEDTAVYYCAAYRDYSGSTVDPPNQSEYDYWGQGTQVTVS

SEQ ID NO: 1777 - protein, 129 aa, Homo sapiens
MAEVQLVESGGGLVQAGASLRLSCAASGGTFCSYAMAWFRQAPGKEREFVAEDSWSNHRVWYSDSVKGRFTISRDNAKNTVYLQMNNLKPEDTAVYYCAAYRDYSGSTVDPPNQSEYDYWGQGTQVTVS

SEQ ID NO: 1778 - protein, 129 aa, Homo sapiens
MAEVQLVESGGGLVQAGASLRLSCAASGGPFSSYAMAWFRQAPGKEREFVAEDSWSNHRVWYSDSVKGRFTISRDNAKNTVYLQMNNLKPEDTAVYYCAAYRDYSGSTVDPPNQSEYDYWGQGTQVTVS

SEQ ID NO: 1779 - protein, 130 aa, Homo sapiens
MAEVQLVESGGGLVKPGESLKLSCVASGETLSSYIMGWFRQAPGKEREFVAAVSWSGNQQDYADSVKGRFTISRDNAKNTVFLQMNSLKPEDTAVYYCAARGGGSSVDSEYDVGEFEYDYWGQGTQVTVS

SEQ ID NO: 1780 - protein, 130 aa, Homo sapiens
MAEVQLVESGGGLVHAGGSLRLSCAASGRPFSSLDMGWFRQRPGKERDVVATINWTGDSTYYLDSVKGRFTISRDNAKNTVFLQMNSLKPEDTAVYYCAARGGGSSVDSEYDVGEFEYDYWGQGTQVTVS

SEQ ID NO: 1781 - protein, 125 aa, Homo sapiens
MAEVQLVESGGGLVESGGSLRLSCTASGFTLDYYAIGWFRQAPGKEREGVSCISSSYSRTTYADSVKGRFTISRDKSKNMIYLQMNSLKPEDTAVYYCATRTLDGLECGGSHYDYFGQGTQVTVS

SEQ ID NO: 1782 - protein, 127 aa, Homo sapiens
MAEVQLVESGGGLMQAGGSLRLSCTASGRTFSTYTMAWFRQAPGKEREFVAAISWSGAYYAESVKGRFTISRDNAKNTVYLQMNSLKPEDTAVYYCAAVIGSTVDSYSPSDPLEYDYWGQGTQVTVS

SEQ ID NO: 1783 - protein, 130 aa, Homo sapiens
MAEVQLVESGGGLAQAGGSLRLSCAASGRPFSSLDMGWFRQRPGKERDVVATINWTGDSTYYLDSVKGRFTISRDNAKNTVFLQMNSLKPEDTAVYYCAARGGGSSVDSEYDVGEFEYDYWGQGTQVTVS

SEQ ID NO: 1784 - protein, 130 aa, Homo sapiens
MAEVQLVESGGGKVQAGDSLRLSCTFSGGAFSRHAVGWFRQAPGKDRDFVAGISWSGRSTDYVNSVKGRFTISRDNAKNTVFLQMNSLKPEDTAVYYCAARGGGSSVDSEYDVGEFEYDYWGQGTQVTVS

SEQ ID NO: 1785 - protein, 130 aa, Homo sapiens
MAEVQLVESGGGFVQAGGSLRLSCAASGRPFSSLDMGWFRQRPGKERDVVATINWTGDSTYYLDSVKGRFTISRDNAKNTVFLQMNSLKPEDTAVYYCAARGGGSSVDSEYDVGEFEYDYWGQGTQVTVS

SEQ ID NO: 1786 - protein, 130 aa, Homo sapiens
MAEVQLVESGGELVQAGGSLRLSCAASGRPFSSLDMGWFRQRPGKERDVVATINWTGDSTYYLDSVKGRFTISRDNAKNTVFLQMNSLKPEDTAVYYCAARGGGSSVDSEYDVGEFEYDYWGQGTQVTVS

SEQ ID NO: 1787 - protein, 127 aa, Homo sapiens
MAEVQLVESGGDLVQPGGSVRVSCVSSGFILDYYAIGWFRQAPGKEREGVSCIDSVGRAYYVDSVKGRFTISRDNAKNTVYLQMNSLKPEDTAVYYCAADFGSSVDSTCLNNQQYDYWGQGTQVTVS

SEQ ID NO: 1788 - protein, 127 aa, Homo sapiens
MAEVQLVESGGDLVQPGGSLRLSCVGSDIALDYYAIGWFRQAPGKEREGIACITDSDGSTYYADSVKGRFTVSKDNAENTVYLQMNNLKPEDTAVYYCAADPRVRFYGGRCDDAYDYWGQGTQVTVS

SEQ ID NO: 1789 - protein, 129 aa, Homo sapiens
MAEVQLVESGGDLVQAGASLRLSCAASGGTFSSYAMAWFRQAPGKEREFVAEDSWSNHRVWYSDSVKGRFTISRDNAKNTVYLQMNNLKPEDTAVYYCAAYRDYSGSTVDPPNQSEYDYWGQGTQVTVS

SEQ ID NO: 1790 - protein, 127 aa, Homo sapiens
MAEVQLVESGEGLVQAGGSLRLSCTASGRTFSTYTMAWFRQAPGKEREFVAAISWSGAYYAESVKGRFTISRDNAKNTVYLQMNSLKPEDTAVYYCAAVIGSTVDSYSPSDPLEYDYWGQGTQVTVS

SEQ ID NO: 1791 - protein, 130 aa, Homo sapiens
MAEVQLVESGEGLVQAGGSLRLSCAASGRPFSSLDMGWFRQRPGKERDVVATINWTGDSTYYLDSVKGRFTISRDNAKNTVFLQMNSLKPEDTAVYYCAARGGGSSVDSEYDVGEFEYDYWGQGTQVTVS

SEQ ID NO: 1792 - protein, 130 aa, Homo sapiens
MADVQLVESGRGLVQAGGSLRLSCAASGRPFSSLDMGWFRQAPGKEREFVAAITWTGGSTYYTDSVKGRFTISRDNAKNTVYLQMNSLKPEDTAVYYCAARGGGTSVDNDYDVGEFEYDYWGQGTQVTVS

SEQ ID NO: 1793 - protein, 120 aa, Homo sapiens
MADVQLVESGGSVRVSCVSSGFILDYYAIGWFRQAPGKEREGVSCIDSVGRAYYVDSVKGRFTISRDNAKNTVYLQMNSLKPEDTAVYYCAADFGSSVDSTCLNNQQYDYWGQGTQVTVS

SEQ ID NO: 1794 - protein, 130 aa, Homo sapiens
MADVQLVESGGRLVQAGGSLRLSCSASGRTFSMHGMGWIRQAPGKEREFVAAIRWSDGSTYYADSVKGRFTISRDNAKNTVFLQMNSLKPEDTAVYYCAARGGGSSVDSEYDVGEFEYDYWGQGTQVTVS

SEQ ID NO: 1795 - protein, 129 aa, Homo sapiens
MADVQLVESGGRLVQAGGSLRLSCAASGRTFTHLNMGWFRRAPGKEREFTAHINWSGGSTNYADSVKGRFTISRDNAKNTVYLQMNSLKPEDTAVYYCAATLGDSVDLDSDADPRGYDYWGQGTQVTVS

SEQ ID NO: 1796 - protein, 129 aa, Homo sapiens
MADVQLVESGGRLVQAGGSLRLSCAASGRTFTHLNMGWFRQAPGKEREFTAHINWSGGSTNYADSVKGRFTISRDNAKNTVYLQMNSLKPEDTAVYYCAATLGDSVDLDSDADPRGYDYWGQGTQVTVS

SEQ ID NO: 1797 - protein, 129 aa, Homo sapiens
MADVQLVESGGRLVQAGGSLRLSCAASGRTFTHLNMGWFRQAPGKEREFTAHINWSGGSTNYADSVKGRFTISRDNAKNTVYLQMNSLKPEDMAVYYCAATLGDSVDLDSDADPRGYDYWGQGTQVTVS

SEQ ID NO: 1798 - protein, 130 aa, Homo sapiens
MADVQLVESGGRLVQAGGSLRLSCAASGRPFNMYDMGWFRQALGKEREFVATVSWTGSSTNYADSVKGRFTISRDNAKNTVYLEMNSLKPEDTAVYYCAARGGGTSVDSDYDVGEFEYDYWGQGTQVTVS

SEQ ID NO: 1799 - protein, 129 aa, Homo sapiens
MADVQLVESGGRLVQAGDSLKLSCAASGRTFSTYTMGWFRQAPGKEREFVAGTSPSGDNRNYGDSVKGRFSISRDNARNTMYLQMNSLKPEDTAVYFCAAFRGSCVDYGCDFRVSQYDYWGQGTQVTVS

SEQ ID NO: 1800 - protein, 126 aa, Homo sapiens
MADVQLVESGGKLVQAGGSLRLSCAVSGVSFRNMGWFRQAPGKEREFVAAISWSGDSTVYADSVKGRVTISRDNAKNTVHLEMNSLKPEDTAVYYCAADGRFRAGRIGTSLGLYHYWGQGTQVTVS

SEQ ID NO: 1801 - protein, 130 aa, Homo sapiens
MADVQLVESGGGVVQAGGSLRLSCAASGRPFSSLDMGWFRQRPGKERDVVATINWTGDSTYYLDSVKGRFTISRDNAKNTVFLQMNSLKPEDTAVYYCAARGGGSSVDSEYDVGEFEYDYWGQGTQVTVS

SEQ ID NO: 1802 - protein, 127 aa, Homo sapiens
MADVQLVESGGGSVQAGGSLRLSCTASGRTFSTYTMAWFRQAPGKEREFVAAITWSGTYYADSVKGRFTISRDNAKNTMYLQMNSLKPEDTAVYICAAVIGSTVDSYSPSDPLEYDYWGQGTQVTVS

SEQ ID NO: 1803 - protein, 127 aa, Homo sapiens
MADVQLVESGGGSVQAGGSLRLSCTASGRTFSTYTMAWFRQAPGKEREFVAAISWSGTYYADSVKGRFTISRDNAKNTVYLQMNSLKPEDTAVYYCAAVIGSTVDSYSPSDPLEYDYWGQGTQVTVS

SEQ ID NO: 1804 - protein, 127 aa, Homo sapiens
MADVQLVESGGGSVQAGGSLRLSCTASGRTFSTYTMAWFRQAPGKEREFVAAISWSGAYYADSVTGRFTISRDNAKNTVYLQMNSLKPEDTAVYYCAAVIGSTVDSYRPGDPLEYDYWGQGTQVTVS

SEQ ID NO: 1805 - protein, 127 aa, Homo sapiens
MADVQLVESGGGSVQAGGSLRLSCTASGRTFSTYTMAWFRQAPGKEREFVAAISWSGAYYADSVTGRFTISRDNAKNTVYLQMNSLKPEDTAVYYCAAVIGSTVDSYRPGDPLEYDYWGKGTQVTVS

SEQ ID NO: 1806 - protein, 127 aa, Homo sapiens
MADVQLVESGGGSVQAGGSLRLSCTASGRTFSTYTMAWFRQAPGKEREFVAAISWSGAYYADSVTGRFTISRDNAKNTVYLQMNSLKPEDTAVYYCAAVIGSTVDSYRPGDPLEYDDWGQGTQVTVS

SEQ ID NO: 1807 - protein, 127 aa, Homo sapiens
MADVQLVESGGGSVQAGGSLRLSCTASGRTFSTYTMAWFRQAPGKEREFVAAISWSGAYYADSVTGRFTISRDNAKNTVYLQMNSLKPEDTAVYYCAAVIGSTVDSYGPGDPLEYDYWGQGTQVTVS

SEQ ID NO: 1808 - protein, 127 aa, Homo sapiens
MADVQLVESGGGSVQAGGSLRLSCTASGRTFSTYTMAWFRQAPGKEREFVAAISWSGAYYADSVTGRFTISRDNAKNTVYLQMNSLKPEDTAIYYCAAVIGSTVDSYRPGDPLEYDYWGQGTQVTVS

SEQ ID NO: 1809 - protein, 127 aa, Homo sapiens
MADVQLVESGGGSVQAGGSLRLSCTASGRTFSTYTMAWFRQAPGKEREFVAAISWSGAYYADSVTGRFTISRDNAKNTVYLQMNSLKPEDMAVYYCAAVIGSTVDSYRPGDPLEYDYWGQGTQVTVS

SEQ ID NO: 1810 - protein, 127 aa, Homo sapiens
MADVQLVESGGGSVQAGGSLRLSCTASGRTFSTYTMAWFRQAPGKEREFVAAISWSGAYYADSVTGRFTISRDNAKNTAYLQMNSLKPEDTAVYYCAAVIGSTVDSYRPGDPLEYDYWGQGTQVTVS

SEQ ID NO: 1811 - protein, 127 aa, Homo sapiens
MADVQLVESGGGSVQAGGSLRLSCTASGRTFSTYTMAWFRQAPGKEREFVAAISWSGAYYADSVTGRFIISRDNAKNTVYLQMNSLKPEDTAVYYCAAVIGSTVDSYRPGDPLEYDYWGQGTQVTVS

SEQ ID NO: 1812 - protein, 127 aa, Homo sapiens
MADVQLVESGGGSVQAGGSLRLSCTASGRTFSTYTMAWFRQAPGKEREFVAAISWSGAYYADSVTGQFTISRDNAKNTVYLQMNSLKPEDTAVYYCAAVIGSTVDSYRPGDPLEYDYWGQGTQVTVS

SEQ ID NO: 1813 - protein, 127 aa, Homo sapiens
MADVQLVESGGGSVQAGGSLRLSCTASGRTFSTYTMAWFRQAPGKEHEFVAAISWSGAYYADSVTGRFTISRDNAKNTVYLQMNSLKPEDTAVYYCAAVIGSTVDSYRPGDPLEYDYWGQGTQVTVS

SEQ ID NO: 1814 - protein, 127 aa, Homo sapiens
MADVQLVESGGGSVQAGGSLRLSCTASGRTFSTYTMARFRQAPGKEREFVAAISWSGAYYADSVTGRFTISRDNAKNTVYLQMNSLKPEDTAVYYCAAVIGSTVDSYRPGDPLEYDYWGQGTQVTVS

SEQ ID NO: 1815 - protein, 132 aa, Homo sapiens
MADVQLVESGGGSVQAGGSLRLSCAASGRTFSSLRMAWFRQAPGKEREFVAENWWNGQGGQGVWYVDSVKGRFTISRDNAKNTLYLQMNNLKPEDTAVYYCAAHRDDSGSTVDPPNQSDYDYWGQGTQVTVS

SEQ ID NO: 1816 - protein, 130 aa, Homo sapiens
MADVQLVESGGGSVQAGGSLRLSCAASGRPFSSLDMGWFRQRPGKERDVVATINWTGDSTYYLDSVKGRFTISRDNAKNTVFLQMNSLKPEDTAVYYCAARGGGSSVDSEYDVGEFEYDYWGQGTQVTVS

SEQ ID NO: 1817 - protein, 129 aa, Homo sapiens
MADVQLVESGGGSVQAGGSLRLSCAASGGTFSSYAMAWFRQAPGKEREFVAEDSWSNHRVWYSDSVKGRFTISRDNAKNTVYLQMNNLKPEDTAVYYCAAYRDYSGSTVDPPNQSEYDYWGQGTQVTVS

SEQ ID NO: 1818 - protein, 129 aa, Homo sapiens
MADVQLVESGGGSVQAGASLRLSCAASGGTFSSYAMAWFRQAPGKEREFVAEDSWSNHRVWYSDSVKGRFTISRDNAKNTVYLQMNNLKPEDTAVYYCAAYRDYSGSTVDPPNQSEYDYWGQGTQVTVS

SEQ ID NO: 1819 - protein, 128 aa, Homo sapiens
MADVQLVESGGGPVQAGGSLRLSCAASGRTFSTYVMAWFRQAPGKEREFVAAISWNGSTYYADSVKGRFTISRDNAKNTVYLQMNSLSPEDTAVYYCAAAIGSTVDSYSPSDPLEYDYWGQGTQVTVS

SEQ ID NO: 1820 - protein, 129 aa, Homo sapiens
MADVQLVESGGGPVQAGGSLRLSCAASGRTFSTYVMAWFRQAPGKEREFVAAISWNGGSTYYADSVKGRFTISRDNTKNTVYLQMNSLSPEDTAVYYCAAAIGSTVDSYSPSDPLEYDYWGQGTQVTVS

SEQ ID NO: 1821 - protein, 129 aa, Homo sapiens
MADVQLVESGGGMVQAGASLRLSCAASGGTFSSYAMAWFRQAPGKEREFVAEDSWSNHRVWYSDSVKGRFTISRDNAKNTVYLQMNNLKPEDTAVYYCAAYRDYSGSTVDPPNQSEYDYWGQGTQVTVS

SEQ ID NO: 1822 - protein, 130 aa, Homo sapiens
MADVQLVESGGGLVRAGGSLRLSCAASGRPFSSLDMGWFRQRPGKERDVVATINWTGDSTYYLDSVKGRFTISRDNAKNTVFLQMNSLKPEDTAVYYCAARGGGSSVDSEYDVGEFEYDYWGQGTQVTVS

SEQ ID NO: 1823 - protein, 129 aa, Homo sapiens
MADVQLVESGGGLVRAGASLRLSCAASGGTFSSYAMAWFRQAPGKEREFVAEDSWSNHRVWYSDSVKGRFTISRDNAKNTVYLQMNNLKPEDTAVYYCAAYRDYSGSTVDPPNQSEYDYWGQGTQVTVS

SEQ ID NO: 1824 - protein, 127 aa, Homo sapiens
MADVQLVESGGGLVQTGGSLRLSCTASGRTFSTYTMAWFRQAPGKEREFVAAISWSGTYYADSVKGRFTISRDNAKNTVYLQMNSLKPEDTAVYYCAAVIGSTVDSYSPSDPLEYDYWGQGTQVTVS

SEQ ID NO: 1825 - protein, 127 aa, Homo sapiens
MADVQLVESGGGLVQTGGSLRLSCTASGRTFSTYTMAWFRQAPGKEREFVAAISWSGAYYAESVKGRFTISRDNAKNTVYLQMNSLKPEDTAVYYCAAVIGSTVDSYSPSDPLEYDYWGQGTQVTVS

SEQ ID NO: 1826 - protein, 126 aa, Homo sapiens
MADVQLVESGGGLVQTGGSLRLSCAASTRTFSDYTMGWFRRAPGKEREFVATISTGGGSRKYGDSVVGRFTISRDNAKNMVYLQMNSLKPEDTAVYYCAASHRGYYSGSYSREYDFWGQGTQVTVS

SEQ ID NO: 1827 - protein, 126 aa, Homo sapiens
MADVQLVESGGGLVQTGGSLRLSCAASTRTFSDYTMGWFRRAPGKEREFVATISTGGGSRKYADSVTGRFTISRDNAKNMVYLQMNSLKPEDTAVYYCAASLRGYYSGSYSREYDLWGQGTQVTVS

SEQ ID NO: 1828 - protein, 130 aa, Homo sapiens
MADVQLVESGGGLVQTGGSLRLSCAASGRPFSSLDMGWFRQRPGKERDVVATINWTGDSTYYLDSVKGRFTISRDNAKNTVFLQMNSLKPEDTAVYYCAARGGGSSVDSEYDVGEFEYDYWGQGTQVTVS

SEQ ID NO: 1829 - protein, 130 aa, Homo sapiens
MADVQLVESGGGLVQTGGSLRLSCAASGRPFSSLDMGWFRQAPGKEREFVATISWTGGSTYYADSVKGRFTISRDNAKNTVYLQMNSLKPEDTAVYYCAARGGGTSVDSDYDVEEFEYDYWGQGTQVTVS

SEQ ID NO: 1830 - protein, 130 aa, Homo sapiens
MADVQLVESGGGLVQTGGSLRLSCAASGRPFNMYDMGWFRQALGKEREFVATVSWTGSSTNYADSVKGRFTISRDNAKNTVYLEMNSLKPEDTAVYYCAARGGGTSVDSDYDVGEFEYDYWGQGTQVTVS

SEQ ID NO: 1831 - protein, 126 aa, Homo sapiens
MADVQLVESGGGLVQTGDSLRLSCAASTRTFSDYTMGWFRRAPGKEREFVATISTGGGSRKYGDSVVGRFTISRDNAKNMVYLHMNSLKPEDTAVYYCAASLRGYYSGSYSREYDLWGQGTQVTVS

SEQ ID NO: 1832 - protein, 125 aa, Homo sapiens
MADVQLVESGGGLVQSGGSLRLSCTASGFTLDYYAIGWFRQAPGKEREGVSCISSSYGRTTYADSVKGRFTISRDKSKNMIYLQMNSLKPEDTAVYYCATRTLDGLECGGSHYDYVGQGTQVTVS

SEQ ID NO: 1833 - protein, 125 aa, Homo sapiens
MADVQLVESGGGLVQSGGSLRLSCTASGFTLDYYAIGWFRQAPGKEREGVSCISSSYGRTTYADSVKGRFTISRDKSKNMIYLQMNSLKPEDTAVYYCATRTLDGLECGGSHYDYFGQGTQVTVS

SEQ ID NO: 1834 - protein, 127 aa, Homo sapiens
MADVQLVESGGGLVQPGGSVRVSCVSSGFILYYYAIGWFRQAPGKEREGVSCIDSVGRAYYVDSVKGRFTISRDNAKNTVYLQMNSLKPEDTAVYYCAADFGSSVDSTCLNNQQYDYWGQGTQVTVS

SEQ ID NO: 1835 - protein, 127 aa, Homo sapiens
MADVQLVESGGGLVQPGGSVRVSCVSSGFILDYYAIGWFRQAPGKEREGVSCIDSVGRAYYVDSVKGRFTISRDNVKNTVYLQMNSLKPEDTAVYYCAADFGSSVDSTCLNNQQYDYWGQGTQVTVS

SEQ ID NO: 1836 - protein, 127 aa, Homo sapiens
MADVQLVESGGGLVQPGGSVRVSCVSSGFILDYYAIGWFRQAPGKEREGVSCIDSVGRAYYVDSVKGRFTISRDNAKNTVYLQMNSLKPEDTAVYYCAADFGSSVDSTCLNNQQYDYWGQGTQVTVS

SEQ ID NO: 1837 - protein, 126 aa, Homo sapiens
MADVQLVESGGGLVQPGGSVRVSCVSSGFILDYYAIGWFRQAPGKEREGVSCIDSVGRAYYVDSVKGRFTISRDNAKNTVYLQMNSLKPEDTAVYYCAADFGSSVDSTCLNNQQYDYWGQGPRSPS

SEQ ID NO: 1838 - protein, 127 aa, Homo sapiens
MADVQLVESGGGLVQPGGSVRVSCVSSGFILDYYAIGWFRQAPGKEREGVSCIDSVGRAYYVDSVKGRFTISRDNAKNTVYLQMNSLKPEDTAVYYCAADFGSSVDSTCLNNQQYDYWDQGTQVTVS

SEQ ID NO: 1839 - protein, 127 aa, Homo sapiens
MADVQLVESGGGLVQPGGSVRVSCVSSGFILDYYAIGWFRQAPGKEREGVSCIDSVGRAYYVDSVKGRFTISRDNAKNTVYLQMNSLKPEDTAVYYCAADFGSSVDSTCLNNQQYDDWGQGTQVTVS

SEQ ID NO: 1840 - protein, 127 aa, Homo sapiens
MADVQLVESGGGLVQPGGSVRVSCVSSGFILDYYAIGWFRQAPGKEREGVSCIDSVGRAYYVDSVKGRFTISRDNAKNTMYLQMNSLKPEDTAVYYCAADFGSSVDSTCLNNQQYDYWGQGTQVTVS

SEQ ID NO: 1841 - protein, 127 aa, Homo sapiens
MADVQLVESGGGLVQPGGSVRVSCVSSGFILDYYAIGWFRQAPGKEREGVSCIDSVGRAYYVDSVKGRFTISRDNAENTVYLQMNSLKPEDTAVYYCAADFGSSVDSTCLNNQQYDYWGQGTQVTVS

SEQ ID NO: 1842 - protein, 127 aa, Homo sapiens
MADVQLVESGGGLVQPGGSVRVSCVSSGFILDYYAIGWFRQAPGKEREGVSCIDSVGRAYYVDSVKGRFIISRDNAKNTVYLQMNSLKPEDTAVYYCAADFGSSVDSTCLNNQQYDYWGQGTQVTVS

SEQ ID NO: 1843 - protein, 127 aa, Homo sapiens
MADVQLVESGGGLVQPGGSVRVSCVSSGFILDYYAIGWFRQAPGKEREGVSCIDSVGRAYYVDSMKGRFTISRDNAKNTVYLQMNSLKPEDTAVYYCAADFGSSVDSTCLNNQQYDYWGQGTQVTVS

SEQ ID NO: 1844 - protein, 128 aa, Homo sapiens
MADVQLVESGGGLVQPGGSLRLSCVSSGFIFDYYAIGWFRQAPGKEREGVSCISSVGRAYYIDSVKGRFTISRDNAKNTVYLQMNSLKPEDTAVYYCAADFGSSVDSTCLSKEQRFDYWGQGTQVTVS

SEQ ID NO: 1845 - protein, 122 aa, Homo sapiens
MADVQLVESGGGLVQPGGSLRLSCTASGYPISTYAMGWVRQAPGKGPEWVATIYYSGVTHYRNSVKGRFTISRDNAKNTLHLQMNSLKPEDTAVYYCAKGVNGTYLRVEAEYRGQGTQVTVS

SEQ ID NO: 1846 - protein, 127 aa, Homo sapiens
MADVQLVESGGGLVQPGGSLRLSCTASGRTFSTYTMAWFRQAPGKEREFVAAITWSTTYYADSVKGRFTISRDNAKNTMYLQMNNLKPEDTAVYICAAVIGSTVDSYSPSDPLEYDYWGQGTQVTVS

SEQ ID NO: 1847 - protein, 127 aa, Homo sapiens
MADVQLVESGGGLVQPGGSLRLSCTASGRTFSTYTMAWFRQAPGKEREFVAAISWSGTYYADSVKGRFTISRDNAKNTVYLQMNSLKPEDTAVYYCAAVIGSTVDSYSPSDPLEYDYWGQGTQVTVS

SEQ ID NO: 1848 - protein, 127 aa, Homo sapiens
MADVQLVESGGGLVQPGGSLRLSCTASGRTFSTYTMAWFRQAPGKEREFVAAISWSGAYYAESVKGRFTISRDNAKNTVYLQMNSLKPEDTAVYYCAAVIGSTVDSYSPSDPLEYDYWGQGTQVTVS

SEQ ID NO: 1849 - protein, 127 aa, Homo sapiens
MADVQLVESGGGLVQPGGSLRLSCTASGRTFSTYTMAWFRQAPGKEREFVAAISWSGAYYADSVTGRFTISRDNAKNTVYLQMNSLKPEDTAVYYCAAVIGSTVDSYRPGDPLEYDYWGQGTQVTVS

SEQ ID NO: 1850 - protein, 124 aa, Homo sapiens
MADVQLVESGGGLVQPGGSLRLSCAASGSIGSINIMGWYRQAPGKQRELVASITSGGATNYADSVKGRFTISRDNAKNTVYLQMNSLKPEDTAVYYCNLDRGTHLGDSFERDDYWGRGTQVTVS

SEQ ID NO: 1851 - protein, 126 aa, Homo sapiens
MADVQLVESGGGLVQPGGSLRLSCAASGRSFSSLDMGWFRRAPGKEREFVAAISGSRGSTDYSDSVKGRFTISRDNAKNTVYLQMNRLKPEDAAVYYCAAGFGSVDGLEYPISYDDWGQGTQVTVS

SEQ ID NO: 1852 - protein, 130 aa, Homo sapiens
MADVQLVESGGGLVQPGGSLRLSCAASGRPFSSLDMGWFRQRPGKERDVVATINWTGDSTYYLDSVKGRFTISRDNAKNTVFLQMNSLKPEDTAVYYCAARGGGSSVDSEYDVGEFEYDYWGQGTQVTVS

SEQ ID NO: 1853 - protein, 130 aa, Homo sapiens
MADVQLVESGGGLVQPGGSLRLSCAASGRPFSSLDMGWFRQAPGKEREFVATISWTGGSTYYADSVKGRFTISRDNAKNTVYLQMNSLKPEDTAVYYCAARGGGTSVDSDYDVEEFEYDYWGQGTQVTVS

SEQ ID NO: 1854 - protein, 130 aa, Homo sapiens
MADVQLVESGGGLVQPGGSLRLSCAASGRPFSSLDMGWFRQAPGKEREFVAAITWTGGSTYYTDSVKGRFTISRDNAKNTVYLQMNSLKPEDTAVYYCAARGGGTSVDNDYDVGEFEYDYWGQGTQVTVS

SEQ ID NO: 1855 - protein, 130 aa, Homo sapiens
MADVQLVESGGGLVQPGGSLRLSCAASGRPFNMYDMGWFRQALGKEREFVATVSWTGSSTNYADSVKGRFTISRDNAKNTVYLEMNSLKPEDTAVYYCAARGGGTSVDSDYDVGEFEYDYWGQGTQVTVS

SEQ ID NO: 1856 - protein, 129 aa, Homo sapiens
MADVQLVESGGGLVQPGGSLRLSCAASGGTFSSYAMAWFRQAPGKEREFVAEDSWSNHRVWYSDSVKGRFTISRDNAKNTVYLQMNNLKPEDTAVYYCAAYRDYSGSTVDPPNQSEYDYWGQGTQVTVS

SEQ ID NO: 1857 - protein, 132 aa, Homo sapiens
MADVQLVESGGGLVQPGGSLRLSCAASGFTSDYYVISWFRQAPGKEREGVSCISSSDTYYADSVKGRFTISRDNAKNTVYLQMNSLKPEDTAVYYCATAAIWDPSGLAVCGSSWYRRGWWDYWGQGTQVTVS

SEQ ID NO: 1858 - protein, 127 aa, Homo sapiens
MADVQLVESGGGLVQPGGSLRLSCAASGFTLDYYIIAWFRQAPGKEREGVSCIHSSDGSTYYADSVKGRFTISRDNAKNTVYLQMNSLKPEDTAVYYCATHEEMDSDLCHHISEYDYWGQGTQVTVS

SEQ ID NO: 1859 - protein, 127 aa, Homo sapiens
MADVQLVESGGGLVQPGGSLRLSCAASGFTLDDYAIGWFRQAPGKEREGVSCISSHGSTYYADSVKGRFTISRDNVKNTLYLQMNSLKPEDTALYYCAASYYSDYEVAVCRSDALDAWGQGTQVTVS

SEQ ID NO: 1860 - protein, 123 aa, Homo sapiens
MADVQLVESGGGLVQPGGSLRLSCAASGFTFSTYAMGWVRQAPGKGPEWVATIYSKGDTTHYANSAKGRFTISRDNARNTLYLQMNSLKPEDTAVYYCAKGISDSYLRVESNYRGQGTQVTVS

SEQ ID NO: 1861 - protein, 127 aa, Homo sapiens
MADVQLVESGGGLVQPGASLRLSCTASGRTFSTYTMAWFRQAPGKEREFVAAISWSGTYYADSVKGRFTISRDNAKNTVYLQMNSLKPEDTAVYYCAAVIGSTVDSYSPSDPLEYDYWGQGTQVTVS

SEQ ID NO: 1862 - protein, 127 aa, Homo sapiens
MADVQLVESGGGLVQARGSLRLSCTASGRTFSTYTMAWFRQAPGKERDFVAAISWSGVYYADSVKGRFTISRDNVKNTMYLQMNNLKPEDTAVYYCAAVIGSTVDSYSPSDPLEYDYWGQGTQVTVS

SEQ ID NO: 1863 - protein, 127 aa, Homo sapiens
MADVQLVESGGGLVQARGSLRLSCTASGRTFSTYTMAWFRQAPGKERDFVAAISWSGAYYADSVKGRFTISRDNAKNTVYLQMNSLKPEDTAVYYCAAVIGSTVDSYSPSDPLDYDYWGQGTQVTVS

SEQ ID NO: 1864 - protein, 130 aa, Homo sapiens
MADVQLVESGGGLVQARGSLRLSCAASGRPFSSLDMGWFRQRPGKERDVVATINWTGDSTYYLDSVKGRFTISRDNAKNTVFLQMNSLKPEDTAVYYCAARGGGSSVDSEYDVGEFEYDYWGQGTQVTVS

SEQ ID NO: 1865 - protein, 104 aa, Homo sapiens
MADVQLVESGGGLVQAPGKEREFVAAITWTGGSTYYTDSVKGRFTISRDNAKNTVYLQMNSLKPEDTAVYYCAARGGGTSVDNDYDVGEFEYDYWGQGTQVTVS

SEQ ID NO: 1866 - protein, 127 aa, Homo sapiens
MADVQLVESGGGLVQAGVSLRLSCTASGRTFSTYTMAWFRQAPGKEREFVAAISWSGTYYADSVKGRFTISRDNAKNTVYLQMNSLKPEDTAVYYCAAVIGSTVDSYSPSDPLEYDYWGQGTQVTVS

SEQ ID NO: 1867 - protein, 127 aa, Homo sapiens
MADVQLVESGGGLVQAGGSPRLSCTASGRTFSTYTMAWFRQAPGKEREFVAAISWSGTYYADSVKGRFTISRDNAKNTVYLQMNSLKPEDTAVYYCAAVIGSTVDSYSPSDPLEYDYWGQGTQVTVS

SEQ ID NO: 1868 - protein, 130 aa, Homo sapiens
MADVQLVESGGGLVQAGGSPRLSCAASGRPFSSLDMGWFRQRPGKERDVVATINWTGDSTYYLDSVKGRFTISRDNAKNTVFLQMNSLKPEDTAVYYCAARGGGSSVDSEYDVGEFEYDYWGQGTQVTVS

SEQ ID NO: 1869 - protein, 130 aa, Homo sapiens
MADVQLVESGGGLVQAGGSPRLSCAASGRPFSSLDMGWFRQAPGKEREFVATISWTGGSTYYADSVKGRFTISRDNAKNTVYLQMNSLKPEDTAVYYCAARGGGTSVDSDYDVEEFEYDYWGQGTQVTVS

SEQ ID NO: 1870 - protein, 130 aa, Homo sapiens
MADVQLVESGGGLVQAGGSLRLSSAASGRPFSSLDMGWFRQRPGKERDVVATINWTGDSTYYLDSVKGRFTISRDNAKNTVFLQMNSLKPEDTAVYYCAARGGGSSVDSEYDVGEFEYDYWGQGTQVTVS

SEQ ID NO: 1871 - protein, 133 aa, Homo sapiens
MADVQLVESGGGLVQAGGSLRLSCVASVASGRTFGWYDMGWFRQAPGKEREFVATISWSGGSTYYADSVKGRSTISRDNAKNTVYLQMNSLKPEDTAVYYCAARGGGTSVDSDYDVGEFEYDYWGQGTQVTVS

SEQ ID NO: 1872 - protein, 133 aa, Homo sapiens
MADVQLVESGGGLVQAGGSLRLSCVASVASGRTFGWYDMGWFRQAPGKEREFVAAISWSGGSTYYADSVKGRSTISRDNAKNTVYLQMNSLKPEDTAVYYCAARGGGTSVDSDYDVGEFEYDYWGQGTQVTVS

SEQ ID NO: 1873 - protein, 125 aa, Homo sapiens
MADVQLVESGGGLVQAGGSLRLSCVASGSTFSINDIGWYRQAPGKQRELVAAISSGGRTNYADSVKGRFTISRDNAKNTVYLQMNSLKPEDTAVYYCNADVQNGDYTRGYRYLEVWGQGTQVTVS

SEQ ID NO: 1874 - protein, 129 aa, Homo sapiens
MADVQLVESGGGLVQAGGSLRLSCVASGRTFSTYTMGWFRQAPGKEREFVAHIGWSGSSTYYADSVKGRFTISRDNAKNTMYLQMNSLKPEDTAVYYCAVAIGSPVDSNRHSDPLEYDYWGQGTQVTVS

SEQ ID NO: 1875 - protein, 129 aa, Homo sapiens
MADVQLVESGGGLVQAGGSLRLSCVASGRTFSTYTMGWFRQAPGKEREFVAHIGWSGSSTYYADSVKGRFTISRDNAKNTMYLQMNSLKPEDTAVYYCAVAIGSPVDSNRHSDPLEYDYWDQGTQVTVS

SEQ ID NO: 1876 - protein, 127 aa, Homo sapiens
MADVQLVESGGGLVQAGGSLRLSCVASGRTFRTYTMGWFRQAPGKEREFVAHIGWSSTDYADSVKGRFTISRDNAKNTMYLQMNSLKPEDTAVYYCAVAIGSPVDSYRHSDPLEYDYWGQGTQVTVS

SEQ ID NO: 1877 - protein, 130 aa, Homo sapiens
MADVQLVESGGGLVQAGGSLRLSCVASGRPFSSLDMGWFRQRPGKERDVVATINWTGDSTYYLDSVKGRFTISRDNAKNTVFLQMNSLKPEDTAVYYCAARGGGSSVDSEYDVGEFEYDYWGQGTQVTVS

SEQ ID NO: 1878 - protein, 130 aa, Homo sapiens
MADVQLVESGGGLVQAGGSLRLSCVASGRPFSSLDMGWFRQAPGKEREFVATISWTGGSTYYADSVKGRFTISRDNAKNTVYLQMNSLKPEDTAVYYCAARGGGTSVDSDYDVEEFEYDYWGQGTQVTVS

SEQ ID NO: 1879 - protein, 130 aa, Homo sapiens
MADVQLVESGGGLVQAGGSLRLSCVASGRPFSSLDMGWFRQAPGKEREFVAAITWTGGSTYYTDSVKGRFTISRDNAKNTVYLQMNSLKPEDTAVYYCAARGGGTSVDNDYDVGEFEYDYWGQGTQVTVS

SEQ ID NO: 1880 - protein, 130 aa, Homo sapiens
MADVQLVESGGGLVQAGGSLRLSCVASGRPFNMYDMGWFRQALGKEREFVATVSWTGSSTNYADSVKGRFTISRDNAKNTVYLEMNSLKPEDTAVYYCAARGGGTSVDSDYDVGEFEYDYWGQGTQVTVS

SEQ ID NO: 1881 - protein, 130 aa, Homo sapiens
MADVQLVESGGGLVQAGGSLRLSCVASGHTDCISGMGWFRQRPGKERDVVATINWTGDSTYYLDSVKGRFTISRDNAKNTVFLQMNSLKPEDTAVYYCAARGGGSSVDSEYDVGEFEYDYWGQGTQVTVS

SEQ ID NO: 1882 - protein, 127 aa, Homo sapiens
MADVQLVESGGGLVQAGGSLRLSCVASGGTFSSYDMGWFRQAPGKEREFVAAINWSGGSTDYPDSVKGRFTISRDNAKNTVYLQMNGLKPEDTAVYYCASRWRSGVDPYYYAGTYDYWGQGTQVTVS

SEQ ID NO: 1883 - protein, 127 aa, Homo sapiens
MADVQLVESGGGLVQAGGSLRLSCTASGRTFSTYVMAWFRQAPGKEREFVAAINWSGTYYADSVKGRFTISRDNAKNTVYLQMNSLKPEDTAVYYCAAVIGSTVDNYSPSDPLEYDYWGQGTQVTVS

SEQ ID NO: 1884 - protein, 127 aa, Homo sapiens
MADVQLVESGGGLVQAGGSLRLSCTASGRTFSTYTMVWFRQAPGKEREFVAAISWSGAYYAESVKGRFTISRDNAKNTVYLQMNSLKPEDTAVYYCAAVIGSTVDSYSPSDPLEYDYWGQGTQVTVS

SEQ ID NO: 1885 - protein, 127 aa, Homo sapiens
MADVQLVESGGGLVQAGGSLRLSCTASGRTFSTYTMGWFRQAPGKEREFVAHISWSSTYYADSVKGRFTISRDNAKNTMYLQMNSLKPEDTAVYYCAVAIGSPVDSYRHRDPLEYDYWGQGTQVTVS

SEQ ID NO: 1886 - protein, 127 aa, Homo sapiens
MADVQLVESGGGLVQAGGSLRLSCTASGRTFSTYTMAWLRQAPGKEREFVAAISWSGTYYADSVKGRFTISRDNAKNTVYLQMNSLKPEDTAVYYCAAVIGSTVDSYSPSDPLEYDYWGQGTQVTVS

SEQ ID NO: 1887 - protein, 127 aa, Homo sapiens
MADVQLVESGGGLVQAGGSLRLSCTASGRTFSTYTMAWFRQTPGKEREFVAAISWSGTYYADSVKGRFTISRDNAKNTVYLQMNSLKPEDTAVYYCAAVIGSTVDSYSPSDPLEYDYWGQGTQVTVS

SEQ ID NO: 1888 - protein, 127 aa, Homo sapiens
MADVQLVESGGGLVQAGGSLRLSCTASGRTFSTYTMAWFRQTPGKEREFVAAISWSGAYYAESVKGRFTISRDNAKNTVYLQMNSLKPEDTAVYYCAAVIGSTVDSYSPSDPLEYDYWGQGTQVTVS

SEQ ID NO: 1889 - protein, 128 aa, Homo sapiens
MADVQLVESGGGLVQAGGSLRLSCTASGRTFSTYTMAWFRQAPRKEREFVAAISWSGTYYYADSVKGRFTISRDNAKNTVYLQMNSLKPEDTAVYYCAAVIGSTVDSYSPSDPLEYDYWGQGTQVTVS

SEQ ID NO: 1890 - protein, 127 aa, Homo sapiens
MADVQLVESGGGLVQAGGSLRLSCTASGRTFSTYTMAWFRQAPGNEREFVAAISWSGTYYADSVKGRFTISRDNAKNTVYLQMNSLKPEDTAVYYCAAVIGSTVDSYSPSDPLEYDYWGQGTQVTVS

SEQ ID NO: 1891 - protein, 127 aa, Homo sapiens
MADVQLVESGGGLVQAGGSLRLSCTASGRTFSTYTMAWFRQAPGKGREFVAAISWSGTYYADSVKGRFTISRDNAKNTVYLQMNSLKPEDTAVYYCAAVIGSTVDSYSPSDPLEYDYWGQGTQVTVS

SEQ ID NO: 1892 - protein, 127 aa, Homo sapiens
MADVQLVESGGGLVQAGGSLRLSCTASGRTFSTYTMAWFRQAPGKEREVVAAISWSGAYYAESVKGRFTISRDNAKNTVYLQMNSLKPEDTAVYYCAAVIGSTVDSYSPSDPLEYDYWGQGTQVTVS

SEQ ID NO: 1893 - protein, 127 aa, Homo sapiens
MADVQLVESGGGLVQAGGSLRLSCTASGRTFSTYTMAWFRQAPGKERELVAAISWSGAYYAESVKGRFTISRDNAKNTVYLQMNSLKPEDTAVYYCAAVIGSTVDSYSPSDPLEYDYWGQGTQVTVS

SEQ ID NO: 1894 - protein, 127 aa, Homo sapiens
MADVQLVESGGGLVQAGGSLRLSCTASGRTFSTYTMAWFRQAPGKEREFVTAISWSGTYYADSVKGRFTISRDNAKNTVYLQMNSLKPEDTAVYYCAAVIGSTVDSYSPSDPLEYDYWGQGTQVTVS

SEQ ID NO: 1895 - protein, 127 aa, Homo sapiens
MADVQLVESGGGLVQAGGSLRLSCTASGRTFSTYTMAWFRQAPGKEREFVSAISWSAVYYTDAVKGRFTISRDNAKNTLYLQMNSLKPEDTAVYSCAAVIGSTVDSYSPSDPLEYDYWGQGTQVTVS

SEQ ID NO: 1896 - protein, 127 aa, Homo sapiens
MADVQLVESGGGLVQAGGSLRLSCTASGRTFSTYTMAWFRQAPGKEREFVSAISWSAVYYADAVKGRFTISRDNAKNTLYLQMNSLKPEDTAVYSCGAVIGSTVDSYSPSDPLEYDYWGQGTQVTVS

SEQ ID NO: 1897 - protein, 127 aa, Homo sapiens
MADVQLVESGGGLVQAGGSLRLSCTASGRTFSTYTMAWFRQAPGKEREFVSAISWSAVYYADAVKGRFTISRDNAKNTLYLQMNSLKPEDTAVYSCAAVIGSTVDSYSPSDPLEYDYWGQGTQVTVS

SEQ ID NO: 1898 - protein, 127 aa, Homo sapiens
MADVQLVESGGGLVQAGGSLRLSCTASGRTFSTYTMAWFRQAPGKEREFVSAISWSAVYYADAMKGRFTISRDNAKNTLYLQMNSLKPEDTAVYSCAAVIGSTVDSYSPSDPLEYDYWGQGTQVTVS

SEQ ID NO: 1899 - protein, 127 aa, Homo sapiens
MADVQLVESGGGLVQAGGSLRLSCTASGRTFSTYTMAWFRQAPGKEREFVGAISWSAVYYADSVKGRFTISRDNAKNTLYLQMNSLKPEDTAVYICAAVIGSTVDSYSPSDPLEYDYWGQGTQVTVS

SEQ ID NO: 1900 - protein, 127 aa, Homo sapiens
MADVQLVESGGGLVQAGGSLRLSCTASGRTFSTYTMAWFRQAPGKEREFVASISWSGTYYADSVKGRFTISRDNAKNTVYLQMNSLKPEDTAVYYCAAVIGSTVDSYSPGDPLEYDYWGQGTQVTVS

SEQ ID NO: 1901 - protein, 127 aa, Homo sapiens
MADVQLVESGGGLVQAGGSLRLSCTASGRTFSTYTMAWFRQAPGKEREFVAAITWSTTYYADSVKGRFTISRDNAKNTMYLQMNNPKPEDTAVYICAAVIGSTVDSYSPSDPLEYDYWGQGTQVTVS

SEQ ID NO: 1902 - protein, 127 aa, Homo sapiens
MADVQLVESGGGLVQAGGSLRLSCTASGRTFSTYTMAWFRQAPGKEREFVAAITWSTTYYADSVKGRFTISRDNAKNTMYLQMNNLKPEDTAVYICAAVIGSTVDSYSPSNPLEYDYWGQGTQVTVS

SEQ ID NO: 1903 - protein, 127 aa, Homo sapiens
MADVQLVESGGGLVQAGGSLRLSCTASGRTFSTYTMAWFRQAPGKEREFVAAITWSTTYYADSVKGRFTISRDNAKNTMYLQMNNLKPEDTAVYICAAVIGSTVDSYSPSDPLEYDYWGQGTQVTVS

SEQ ID NO: 1904 - protein, 126 aa, Homo sapiens
MADVQLVESGGGLVQAGGSLRLSCTASGRTFSTYTMAWFRQAPGKEREFVAAITWSTTYYADSVKGRFTISRDNAKNTMYLQMNNLKPEDTAVYICAAVIGSTVDSYSPSDPLEYDYWGQGPRSPS

SEQ ID NO: 1905 - protein, 127 aa, Homo sapiens
MADVQLVESGGGLVQAGGSLRLSCTASGRTFSTYTMAWFRQAPGKEREFVAAITWSTTYYADSVKGRFTISRDNAKNTMYLQMNNLKPEDTAVYICAAVIGSTVDSYSPSDPLEYDYWGKGTQVTVS

SEQ ID NO: 1906 - protein, 127 aa, Homo sapiens
MADVQLVESGGGLVQAGGSLRLSCTASGRTFSTYTMAWFRQAPGKEREFVAAITWSTTYYADSVKGRFTISRDNAKNTMYLQMNNLKPEDTAVYICAAVIGSTVDSYSPSDPLEYDDWGQGTQVTVS

SEQ ID NO: 1907 - protein, 127 aa, Homo sapiens
MADVQLVESGGGLVQAGGSLRLSCTASGRTFSTYTMAWFRQAPGKEREFVAAITWSTTYYADSVKGRFIISRDNAKNTMYLQMNNLKPEDTAVYICAAVIGSTVDSYSPSDPLEYDYWGQGTQVTVS

SEQ ID NO: 1908 - protein, 127 aa, Homo sapiens
MADVQLVESGGGLVQAGGSLRLSCTASGRTFSTYTMAWFRQAPGKEREFVAAITWSGTYYADSVKGRFTISRENAKNTMYLQMNSLKPEDTAVYICAAVIGSTVDSYSPSDPLEYDYWGQGTQVTVS

SEQ ID NO: 1909 - protein, 127 aa, Homo sapiens
MADVQLVESGGGLVQAGGSLRLSCTASGRTFSTYTMAWFRQAPGKEREFVAAITWSGTYYADSVKGRFTISRDNAKNTVYLQMNSLKPEDTAVYYCAAVIGSTVDSYSPSDPLEYDYWGQGTQVTVS

SEQ ID NO: 1910 - protein, 127 aa, Homo sapiens
MADVQLVESGGGLVQAGGSLRLSCTASGRTFSTYTMAWFRQAPGKEREFVAAITWSGTYYADSVKGRFTISRDNAKNTMYLQMNSLKPEDTAVYICAAVIGSTVDSYSPSDPLEYDYWGQGTQVTVS

SEQ ID NO: 1911 - protein, 127 aa, Homo sapiens
MADVQLVESGGGLVQAGGSLRLSCTASGRTFSTYTMAWFRQAPGKEREFVAAISWSGTYYVDSVKGRFTISRDNAKNTVYLQMNSLKPEDTAVYYCAAVIGSTVDSYSPSDPLEYDYWGQGTQVTVS

SEQ ID NO: 1912 - protein, 127 aa, Homo sapiens
MADVQLVESGGGLVQAGGSLRLSCTASGRTFSTYTMAWFRQAPGKEREFVAAISWSGTYYTDSVKGRFTISRDNAKNTVYLQMNSLKPEDTAVYYCAAVIGSTVDSYSPSDPLEYDYWGQGTQVTVS

SEQ ID NO: 1913 - protein, 127 aa, Homo sapiens
MADVQLVESGGGLVQAGGSLRLSCTASGRTFSTYTMAWFRQAPGKEREFVAAISWSGTYYAESVKGRFTISRDNAKNTVYLQMNSLKPEDTAVYYCAAVIGSTVDSYSPSDPLEYDYWGQGTQVTVS

SEQ ID NO: 1914 - protein, 127 aa, Homo sapiens
MADVQLVESGGGLVQAGGSLRLSCTASGRTFSTYTMAWFRQAPGKEREFVAAISWSGTYYADSVKGRFTISRDNAKNTVYLQMNSPKPEDTAVYYCAAVIGSTVDSYSPSDPLEYDYWGQGTQVTVS

SEQ ID NO: 1915 - protein, 127 aa, Homo sapiens
MADVQLVESGGGLVQAGGSLRLSCTASGRTFSTYTMAWFRQAPGKEREFVAAISWSGTYYADSVKGRFTISRDNAKNTVYLQMNSLKPEDTVVYYCAAVIGSTVDSYSPSDPLEYDYWGQGTQVTVS

SEQ ID NO: 1916 - protein, 127 aa, Homo sapiens
MADVQLVESGGGLVQAGGSLRLSCTASGRTFSTYTMAWFRQAPGKEREFVAAISWSGTYYADSVKGRFTISRDNAKNTVYLQMNSLKPEDTTVYYCAAVIGSTVDSYSPSDPLEYDYWGQGTQVTVS

SEQ ID NO: 1917 - protein, 127 aa, Homo sapiens
MADVQLVESGGGLVQAGGSLRLSCTASGRTFSTYTMAWFRQAPGKEREFVAAISWSGTYYADSVKGRFTISRDNAKNTVYLQMNSLKPEDTAVYYCAAVVGSTVDSYSPSDPLEYDYWGQGTQVTVS

SEQ ID NO: 1918 - protein, 127 aa, Homo sapiens
MADVQLVESGGGLVQAGGSLRLSCTASGRTFSTYTMAWFRQAPGKEREFVAAISWSGTYYADSVKGRFTISRDNAKNTVYLQMNSLKPEDTAVYYCAAVIGSTVDSYSTSDPLEYDYWGQGTQVTVS

SEQ ID NO: 1919 - protein, 126 aa, Homo sapiens
MADVQLVESGGGLVQAGGSLRLSCTASGRTFSTYTMAWFRQAPGKEREFVAAISWSGTYYADSVKGRFTISRDNAKNTVYLQMNSLKPEDTAVYYCAAVIGSTVDSYSPSDPLSTTTGARGPRSPS

SEQ ID NO: 1920 - protein, 127 aa, Homo sapiens
MADVQLVESGGGLVQAGGSLRLSCTASGRTFSTYTMAWFRQAPGKEREFVAAISWSGTYYADSVKGRFTISRDNAKNTVYLQMNSLKPEDTAVYYCAAVIGSTVDSYSPSDPLEYNYWGQGTQVTVS

SEQ ID NO: 1921 - protein, 127 aa, Homo sapiens
MADVQLVESGGGLVQAGGSLRLSCTASGRTFSTYTMAWFRQAPGKEREFVAAISWSGTYYADSVKGRFTISRDNAKNTVYLQMNSLKPEDTAVYYCAAVIGSTVDSYSPSDPLEYDYWGRGTQVTVS

SEQ ID NO: 1922 - protein, 127 aa, Homo sapiens
MADVQLVESGGGLVQAGGSLRLSCTASGRTFSTYTMAWFRQAPGKEREFVAAISWSGTYYADSVKGRFTISRDNAKNTVYLQMNSLKPEDTAVYYCAAVIGSTVDSYSPSDPLEYDYWGQGTQVTVS

SEQ ID NO: 1923 - protein, 127 aa, Homo sapiens
MADVQLVESGGGLVQAGGSLRLSCTASGRTFSTYTMAWFRQAPGKEREFVAAISWSGTYYADSVKGRFTISRDNAKNTVYLQMNSLKPEDTAVYYCAAVIGSTVDSYSPSDPLEYDYWDQGTQVTVS

SEQ ID NO: 1924 - protein, 127 aa, Homo sapiens
MADVQLVESGGGLVQAGGSLRLSCTASGRTFSTYTMAWFRQAPGKEREFVAAISWSGTYYADSVKGRFTISRDNAKNTVYLQMNSLKPEDTAVYYCAAVIGSTVDSYSPSDPLEYDDWGQGTQVTVS

SEQ ID NO: 1925 - protein, 127 aa, Homo sapiens
MADVQLVESGGGLVQAGGSLRLSCTASGRTFSTYTMAWFRQAPGKEREFVAAISWSGTYYADSVKGRFTISRDNAKNTVYLQMNSLKPEDTAVYYCAAVIGSTVDSYSPSDPLESDYWGQGTQVTVS

SEQ ID NO: 1926 - protein, 127 aa, Homo sapiens
MADVQLVESGGGLVQAGGSLRLSCTASGRTFSTYTMAWFRQAPGKEREFVAAISWSGTYYADSVKGRFTISRDNAKNTVYLQMNSLKPEDTAVYYCAAVIGSTVDSYSPSDPLEFDYWGQGTQVTVS

SEQ ID NO: 1927 - protein, 127 aa, Homo sapiens
MADVQLVESGGGLVQAGGSLRLSCTASGRTFSTYTMAWFRQAPGKEREFVAAISWSGTYYADSVKGRFTISRDNAKNTVYLQMNSLKPEDTAVYYCAAVIGSTVDSYSPSDPLECDYWGQGTQVTVS

SEQ ID NO: 1928 - protein, 127 aa, Homo sapiens
MADVQLVESGGGLVQAGGSLRLSCTASGRTFSTYTMAWFRQAPGKEREFVAAISWSGTYYADSVKGRFTISRDNAKNTVYLQMNSLKPEDTAVYYCAAVIGSTVDSYSPSDPLDYDYWGQGTQVTVS

SEQ ID NO: 1929 - protein, 127 aa, Homo sapiens
MADVQLVESGGGLVQAGGSLRLSCTASGRTFSTYTMAWFRQAPGKEREFVAAISWSGTYYADSVKGRFTISRDNAKNTVYLQMNSLKPEDTAVYYCAAVIGSTVDSYSPSDHLEYDYWGQGTQVTVS

SEQ ID NO: 1930 - protein, 127 aa, Homo sapiens
MADVQLVESGGGLVQAGGSLRLSCTASGRTFSTYTMAWFRQAPGKEREFVAAISWSGTYYADSVKGRFTISRDNAKNTVYLQMNSLKPEDTAVYYCAAVIGSTVDSYNPSDPLEYDYWGQGTQVTVS

SEQ ID NO: 1931 - protein, 127 aa, Homo sapiens
MADVQLVESGGGLVQAGGSLRLSCTASGRTFSTYTMAWFRQAPGKEREFVAAISWSGTYYADSVKGRFTISRDNAKNTVYLQMNSLKPEDTAVYYCAAVIGSTVDSYGPSDPLEYDYWGQGTQVTVS

SEQ ID NO: 1932 - protein, 127 aa, Homo sapiens
MADVQLVESGGGLVQAGGSLRLSCTASGRTFSTYTMAWFRQAPGKEREFVAAISWSGTYYADSVKGRFTISRDNAKNTVYLQMNSLKPEDTAVYYCAAVIGSTIDSYSPSDPLEYDYWGQGTQVTVS

SEQ ID NO: 1933 - protein, 127 aa, Homo sapiens
MADVQLVESGGGLVQAGGSLRLSCTASGRTFSTYTMAWFRQAPGKEREFVAAISWSGTYYADSVKGRFTISRDNAKNTVYLQMNSLKPEDTAVYYCAAVIGLTVDSYSPSDPLEYDYWGQGTQVTVS

SEQ ID NO: 1934 - protein, 127 aa, Homo sapiens
MADVQLVESGGGLVQAGGSLRLSCTASGRTFSTYTMAWFRQAPGKEREFVAAISWSGTYYADSVKGRFTISRDNAKNTVYLQMNSLKPEDTAVYYCAAVIGATVDSYSPSDPLEYDYWGQGTQVTVS

SEQ ID NO: 1935 - protein, 127 aa, Homo sapiens
MADVQLVESGGGLVQAGGSLRLSCTASGRTFSTYTMAWFRQAPGKEREFVAAISWSGTYYADSVKGRFTISRDNAKNTVYLQINSLKPEDTAVYYCAAVIGSTVDSYSPSDPLEYDYWGQGTQVTVS

SEQ ID NO: 1936 - protein, 127 aa, Homo sapiens
MADVQLVESGGGLVQAGGSLRLSCTASGRTFSTYTMAWFRQAPGKEREFVAAISWSGTYYADSVKGRFIISRDNAKNTVYLQMNSLKPEDTAVYYCAAVIGSTVDSYSPSDPLEYDYWGQGTQVTVS

SEQ ID NO: 1937 - protein, 127 aa, Homo sapiens
MADVQLVESGGGLVQAGGSLRLSCTASGRTFSTYTMAWFRQAPGKEREFVAAISWSGTYYADSVKGQFTISRDNAKNTVYLQMNSLKPEDTAVYYCAAVIGSTVDSYSPSDPLEYDYWGQGTQVTVS

SEQ ID NO: 1938 - protein, 127 aa, Homo sapiens
MADVQLVESGGGLVQAGGSLRLSCTASGRTFSTYTMAWFRQAPGKEREFVAAISWSGTYYADSVKDRFTISRDNAKNTVYLQMNSLKPEDTAVYYCAAVIGSTVDSYSPSDPLEYDYWGQGTQVTVS

SEQ ID NO: 1939 - protein, 127 aa, Homo sapiens
MADVQLVESGGGLVQAGGSLRLSCTASGRTFSTYTMAWFRQAPGKEREFVAAISWSGTYYADSMKGRFTISRDNAKNTVYLQMNSLKPEDTAVYYCAAVIGSTVDSYSPSDPLEYDYWGQGTQVTVS

SEQ ID NO: 1940 - protein, 127 aa, Homo sapiens
MADVQLVESGGGLVQAGGSLRLSCTASGRTFSTYTMAWFRQAPGKEREFVAAISWSGTYYADSAKGRFTISRDNAKNTVYLQMNSLKPEDTAVYYCAAVIGSTVDSYSPSDPLEYDYWGQGTQVTVS

SEQ ID NO: 1941 - protein, 127 aa, Homo sapiens
MADVQLVESGGGLVQAGGSLRLSCTASGRTFSTYTMAWFRQAPGKEREFVAAISWSGAYYVESVKGRFTISRDNAKNTVYLQMNSLKPEDTAVYYCAAVIGSTVDSYSPSDPLEYDYWGQGTQVTVS

SEQ ID NO: 1942 - protein, 127 aa, Homo sapiens
MADVQLVESGGGLVQAGGSLRLSCTASGRTFSTYTMAWFRQAPGKEREFVAAISWSGAYYTESVKGRFTISRDNAKNTVYLQMNSLKPEDTAVYYCAAVIGSTVDSYSPSDPLEYDYWGQGTQVTVS

SEQ ID NO: 1943 - protein, 127 aa, Homo sapiens
MADVQLVESGGGLVQAGGSLRLSCTASGRTFSTYTMAWFRQAPGKEREFVAAISWSGAYYAESVKGRFTISRDNAKNTVYLQMNSLKPEDTVVYYCAAVIGSTVDSYSPSDPLEYDYWGQGTQVTVS

SEQ ID NO: 1944 - protein, 127 aa, Homo sapiens
MADVQLVESGGGLVQAGGSLRLSCTASGRTFSTYTMAWFRQAPGKEREFVAAISWSGAYYAESVKGRFTISRDNAKNTVYLQMNSLKPEDTTVYYCAAVIGSTVDSYSPSDPLEYDYWGQGTQVTVS

SEQ ID NO: 1945 - protein, 127 aa, Homo sapiens
MADVQLVESGGGLVQAGGSLRLSCTASGRTFSTYTMAWFRQAPGKEREFVAAISWSGAYYAESVKGRFTISRDNAKNTVYLQMNSLKPEDTAVYYCAAVIVSTVDSYSPSDPLEYDYWGQGTQVTVS

SEQ ID NO: 1946 - protein, 127 aa, Homo sapiens
MADVQLVESGGGLVQAGGSLRLSCTASGRTFSTYTMAWFRQAPGKEREFVAAISWSGAYYAESVKGRFTISRDNAKNTVYLQMNSLKPEDTAVYYCAAVIGSTVDSYSPSGPLEYDYWGQGTQVTVS

SEQ ID NO: 1947 - protein, 127 aa, Homo sapiens
MADVQLVESGGGLVQAGGSLRLSCTASGRTFSTYTMAWFRQAPGKEREFVAAISWSGAYYAESVKGRFTISRDNAKNTVYLQMNSLKPEDTAVYYCAAVIGSTVDSYSPSDPREYDYWGQGTQVTVS

SEQ ID NO: 1948 - protein, 127 aa, Homo sapiens
MADVQLVESGGGLVQAGGSLRLSCTASGRTFSTYTMAWFRQAPGKEREFVAAISWSGAYYAESVKGRFTISRDNAKNTVYLQMNSLKPEDTAVYYCAAVIGSTVDSYSPSDPLEYNYWGQGTQVTVS

SEQ ID NO: 1949 - protein, 127 aa, Homo sapiens
MADVQLVESGGGLVQAGGSLRLSCTASGRTFSTYTMAWFRQAPGKEREFVAAISWSGAYYAESVKGRFTISRDNAKNTVYLQMNSLKPEDTAVYYCAAVIGSTVDSYSPSDPLEYGYWGQGTQVTVS

SEQ ID NO: 1950 - protein, 127 aa, Homo sapiens
MADVQLVESGGGLVQAGGSLRLSCTASGRTFSTYTMAWFRQAPGKEREFVAAISWSGAYYAESVKGRFTISRDNAKNTVYLQMNSLKPEDTAVYYCAAVIGSTVDSYSPSDPLEYDYWGQWTQVTVS

SEQ ID NO: 1951 - protein, 127 aa, Homo sapiens
MADVQLVESGGGLVQAGGSLRLSCTASGRTFSTYTMAWFRQAPGKEREFVAAISWSGAYYAESVKGRFTISRDNAKNTVYLQMNSLKPEDTAVYYCAAVIGSTVDSYSPSDPLEYDYWGQVTQVTVS

SEQ ID NO: 1952 - protein, 127 aa, Homo sapiens
MADVQLVESGGGLVQAGGSLRLSCTASGRTFSTYTMAWFRQAPGKEREFVAAISWSGAYYAESVKGRFTISRDNAKNTVYLQMNSLKPEDTAVYYCAAVIGSTVDSYSPSDPLEYDYWGQGTQVTVS

SEQ ID NO: 1953 - protein, 127 aa, Homo sapiens
MADVQLVESGGGLVQAGGSLRLSCTASGRTFSTYTMAWFRQAPGKEREFVAAISWSGAYYAESVKGRFTISRDNAKNTVYLQMNSLKPEDTAVYYCAAVIGSTVDSYSPSDPLEYDYGGQGTQVTVS

SEQ ID NO: 1954 - protein, 127 aa, Homo sapiens
MADVQLVESGGGLVQAGGSLRLSCTASGRTFSTYTMAWFRQAPGKEREFVAAISWSGAYYAESVKGRFTISRDNAKNTVYLQMNSLKPEDTAVYYCAAVIGSTVDSYSPSDPLEYDDWGQGTQVTVS

SEQ ID NO: 1955 - protein, 127 aa, Homo sapiens
MADVQLVESGGGLVQAGGSLRLSCTASGRTFSTYTMAWFRQAPGKEREFVAAISWSGAYYAESVKGRFTISRDNAKNTVYLQMNSLKPEDTAVYYCAAVIGSTVDSYSPSAPLEYDYWGQGTQVTVS

SEQ ID NO: 1956 - protein, 127 aa, Homo sapiens
MADVQLVESGGGLVQAGGSLRLSCTASGRTFSTYTMAWFRQAPGKEREFVAAISWSGAYYAESVKGRFTISRDNAKNTVYLQMNSLKPEDTAVYYCAAVIGSTVDSYSPGDPLEYDYWGQGTQVTVS

SEQ ID NO: 1957 - protein, 127 aa, Homo sapiens
MADVQLVESGGGLVQAGGSLRLSCTASGRTFSTYTMAWFRQAPGKEREFVAAISWSGAYYAESVKGRFTISRDNAKNTVYLQMNSLKPEDTAVYYCAAVIGSTVDSYSHSDPLEYDYWGQGTQVTVS

SEQ ID NO: 1958 - protein, 127 aa, Homo sapiens
MADVQLVESGGGLVQAGGSLRLSCTASGRTFSTYTMAWFRQAPGKEREFVAAISWSGAYYAESVKGRFTISRDNAKNTVYLQMNSLKPEDTAVYYCAAVIGSTVDSYNPSDPLEYDYWGQGTQVTVS

SEQ ID NO: 1959 - protein, 127 aa, Homo sapiens
MADVQLVESGGGLVQAGGSLRLSCTASGRTFSTYTMAWFRQAPGKEREFVAAISWSGAYYAESVKGRFTISRDNAKNTVYLQMNSLKPEDTAVYYCAAVIGSTVDSYGPSDPLEYDYWGQGTQVTVS

SEQ ID NO: 1960 - protein, 127 aa, Homo sapiens
MADVQLVESGGGLVQAGGSLRLSCTASGRTFSTYTMAWFRQAPGKEREFVAAISWSGAYYAESVKGRFTISRDNAKNTVYLQMNSLKPEDTAVYYCAAVIGSTIDSYSPSDPLEYDYWGQGTQVTVS

SEQ ID NO: 1961 - protein, 127 aa, Homo sapiens
MADVQLVESGGGLVQAGGSLRLSCTASGRTFSTYTMAWFRQAPGKEREFVAAISWSGAYYAESVKGRFTISRDNAKNTVYLQMNSLKPEDTAVYYCAAVIGSSVDSYSPSDPLEYDYWGQGTQVTVS

SEQ ID NO: 1962 - protein, 127 aa, Homo sapiens
MADVQLVESGGGLVQAGGSLRLSCTASGRTFSTYTMAWFRQAPGKEREFVAAISWSGAYYAESVKGRFTISRDNAKNTVYLQMNSLKPEDTAVYYCAAVIGSIVDSYSPSDPLEYDYWGQGTQVTVS

SEQ ID NO: 1963 - protein, 127 aa, Homo sapiens
MADVQLVESGGGLVQAGGSLRLSCTASGRTFSTYTMAWFRQAPGKEREFVAAISWSGAYYAESVKGRFTISRDNAKNTVYLQMNSLKPEDTAVYYCAAVIGATVDSYSPSDPLEYDYWGQGTQVTVS

SEQ ID NO: 1964 - protein, 127 aa, Homo sapiens
MADVQLVESGGGLVQAGGSLRLSCTASGRTFSTYTMAWFRQAPGKEREFVAAISWSGAYYAESVKGRFTISRDNAKNTVYLQMNSLKPEDMAVYYCAAVIGSTVDSYSPSDPLEYDYWGQGTQVTVS

SEQ ID NO: 1965 - protein, 127 aa, Homo sapiens
MADVQLVESGGGLVQAGGSLRLSCTASGRTFSTYTMAWFRQAPGKEREFVAAISWSGAYYAESVKGRFTISRDNAKNTVYLQMNSLKPEDAAVYYCAAVIGSTVDSYSPSDPLEYDYWGQGTQVTVS

SEQ ID NO: 1966 - protein, 127 aa, Homo sapiens
MADVQLVESGGGLVQAGGSLRLSCTASGRTFSTYTMAWFRQAPGKEREFVAAISWSGAYYAESVKGRFTISRDNAKNTVYLQINSLKPEDTAVYYCAAVIGSTVDSYSPSDPLEYDYWGQGTQVTVS

SEQ ID NO: 1967 - protein, 127 aa, Homo sapiens
MADVQLVESGGGLVQAGGSLRLSCTASGRTFSTYTMAWFRQAPGKEREFVAAISWSGAYYAESVKGRFTISRDNAKNMVYLQMNSLKPEDTAVYYCAAVIGSTVDSYSPSDPLEYDYWGQGTQVTVS

SEQ ID NO: 1968 - protein, 127 aa, Homo sapiens
MADVQLVESGGGLVQAGGSLRLSCTASGRTFSTYTMAWFRQAPGKEREFVAAISWSGAYYAESVKGRFTISIDNAKNTVYLQMNSLKPEDTAVYYCAAVIGSTVDSYSPSDPLEYDYWGQGTQVTVS

SEQ ID NO: 1969 - protein, 127 aa, Homo sapiens
MADVQLVESGGGLVQAGGSLRLSCTASGRTFSTYTMAWFRQAPGKEREFVAAISWSGAYYAESVKGRFTIPRDNAKNTVYLQMNSLKPEDTAVYYCAAVIGSTVDSYSPSDPLEYDYWGQGTQVTVS

SEQ ID NO: 1970 - protein, 127 aa, Homo sapiens
MADVQLVESGGGLVQAGGSLRLSCTASGRTFSTYTMAWFRQAPGKEREFVAAISWSGAYYAESVKGQFTISRDNAKNTVYLQMNSLKPEDTAVYYCAAVIGSTVDSYSPSDPLEYDYWGQGTQVTVS

SEQ ID NO: 1971 - protein, 127 aa, Homo sapiens
MADVQLVESGGGLVQAGGSLRLSCTASGRTFSTYTMAWFRQAPGKEREFVAAISWSGAYYAESMKGRFTISRDNAKNTVYLQMNSLKPEDTAVYYCAAVIGSTVDSYSPSDPLEYDYWGQGTQVTVS

SEQ ID NO: 1972 - protein, 127 aa, Homo sapiens
MADVQLVESGGGLVQAGGSLRLSCTASGRTFSTYTMAWFRQAPGKEREFVAAISWSGAYYADSVTGRFTISRDNAKNTVYLQMNSLKPEDTAVYYCAAVIGSTVDSYRPGDPLEYDYWGQGTQVTVS

SEQ ID NO: 1973 - protein, 127 aa, Homo sapiens
MADVQLVESGGGLVQAGGSLRLSCTASGRTFSTYTMAWFRQAPGKEREFVAAISWSGAYYADSVKGRFTISRDNAKNTVYLQMNSLKPEDTAVYYCAAVIGSTVDSYSPSDPLEYDYWGQGTQVTVS

SEQ ID NO: 1974 - protein, 127 aa, Homo sapiens
MADVQLVESGGGLVQAGGSLRLSCTASGRTFSTYTMAWFRQAPGKEREFVAAISWSCAYYAESVKGRFTISRDNAKNTVYLQMNSLKPEDTAVYYCAAVIGSTVDSYSPSDPLEYDYWGQGTQVTVS

SEQ ID NO: 1975 - protein, 127 aa, Homo sapiens
MADVQLVESGGGLVQAGGSLRLSCTASGRTFSTYTMAWFRQAPGKEREFVAAIAWSGAYYADSVKGRFTISRDNAKNTVYLQMNSLKPEDTAVYICAAAIGSTVDSYSPSDPLEYDYWGQGTQVTVS

SEQ ID NO: 1976 - protein, 127 aa, Homo sapiens
MADVQLVESGGGLVQAGGSLRLSCTASGRTFSTYTMAWFRQAPGKEREFEAAISWSGAYYAESVKGRFTISRDNAKNTVYLQMNSLKPEDTAVYYCAAVIGSTVDSYSPSDPLEYDYWGQGTQVTVS

SEQ ID NO: 1977 - protein, 127 aa, Homo sapiens
MADVQLVESGGGLVQAGGSLRLSCTASGRTFSTYTMAWFRQAPGKERDFVAAISWTGVYYADSVKGRFTISRDNAKNTVYLQMNSLKPEDTAVYYCAAVIGSTVDSYSPSDPLEYDYWGQGTQVTVS

SEQ ID NO: 1978 - protein, 127 aa, Homo sapiens
MADVQLVESGGGLVQAGGSLRLSCTASGRTFSTYTMAWFRQAPGKERDFVAAISWSGVYYVDSVKGRFTISRDNAKNTVYLQMNSLKPEDTAVYYCAAVIGSTVDSYSPSDPLEYDYWGQGTQVTVS

SEQ ID NO: 1979 - protein, 127 aa, Homo sapiens
MADVQLVESGGGLVQAGGSLRLSCTASGRTFSTYTMAWFRQAPGKERDFVAAISWSGVYYADSVKGRFTISRDNAKNTVYLQMNSLKPEDTAVYYCAAVIGSTVDSYSPSDPLEYDYWGQGTQVTVS

SEQ ID NO: 1980 - protein, 127 aa, Homo sapiens
MADVQLVESGGGLVQAGGSLRLSCTASGRTFSTYTMAWFRQAPGKERDFVAAISWSGVYYADSVKGRFTISRDNAKNTVYLQMNSLKPEDTAVYYCAAVIGSIVDSYSPSDPLEYDYWGQGTQVTVS

SEQ ID NO: 1981 - protein, 127 aa, Homo sapiens
MADVQLVESGGGLVQAGGSLRLSCTASGRTFSTYTMAWFRQAPGKERDFVAAISWSGVYYADSVKGRFTISRDNAKNTVFLQMNSLKPEDTAVYYCAAVIGSTVDSYSPSDPLEYDYWGQGTQVTVS

SEQ ID NO: 1982 - protein, 127 aa, Homo sapiens
MADVQLVESGGGLVQAGGSLRLSCTASGRTFSTYTMAWFRQAPGKERDFVAAISWSGTYYADSVKGRYTISRDNAKNTVYLQMNSLKPEDTAVYYCAAVIGSTVDSYSPSDPLEYDYWGQGTQVTVS

SEQ ID NO: 1983 - protein, 127 aa, Homo sapiens
MADVQLVESGGGLVQAGGSLRLSCTASGRTFSTYTMAWFRQAPGKERDFVAAISWSGTYYADSVKGRYTISRDNAKNTVHLQMNSLKPEDTAVYYCTAVIGSTVDSYSPSDPLEYDYWGQGTQVTVS

SEQ ID NO: 1984 - protein, 127 aa, Homo sapiens
MADVQLVESGGGLVQAGGSLRLSCTASGRTFSTYTMAWFRQAPGKERDFVAAISWSGAYYADSVKGRFTISRDNAKNTVYLQMNSLKPEDTAVYYCAAVIGSTVDSYSPSDPLEYDYWGQGTQVTVS

SEQ ID NO: 1985 - protein, 127 aa, Homo sapiens
MADVQLVESGGGLVQAGGSLRLSCTASGRTFSTYTMAWFRQAPGKERDFVAAISWSGAYYADSVKGRFTISRDNAKNTVYLQMNSLKPEDTAVYYCAAVIGSTVDSYSPSDPLDYDYWGQGTQVTVS

SEQ ID NO: 1986 - protein, 127 aa, Homo sapiens
MADVQLVESGGGLVQAGGSLRLSCTASGRTFSTYTMAWFRQAPGKERDFVAAISWSGAYYADSAKGRFTISRDNAKNTVYLQMNSLKPEDTAVYVCAAVIGSTVDSYSPSDPLEYDYWGQGTQVTVS

SEQ ID NO: 1987 - protein, 127 aa, Homo sapiens
MADVQLVESGGGLVQAGGSLRLSCTASGRTFSTYTMAWFRQAPGKERDFVAAIDWSGVYYADSVKGRFTISRDNAKNTLYLQMNSLKPEDTAVYYCAAVIGSTVDSYSPSDPLEYDYWGQGTQVTVS

SEQ ID NO: 1988 - protein, 127 aa, Homo sapiens
MADVQLVESGGGLVQAGGSLRLSCTASGRTFSTYTMAWFRQAPGKEHEFVAAISWSGAYYAESVKGRFTISRDNAKNTVYLQMNSLKPEDTAVYYCAAVIGSTVDSYSPSDPLEYDYWGQGTQVTVS

SEQ ID NO: 1989 - protein, 127 aa, Homo sapiens
MADVQLVESGGGLVQAGGSLRLSCTASGRTFSTYTMAWFHQAPGKEREFVAAISWSGTYYADSVKGRFTISRDNAKNTVYLQMNSLKPEDTAVYYCAAVIGSTVDSYSPSDPLEYDYWGQGTQVTVS

SEQ ID NO: 1990 - protein, 127 aa, Homo sapiens
MADVQLVESGGGLVQAGGSLRLSCTASGRTFSTYTMAWFHQAPGKEREFVAAISWSGAYYAESVKGRFTISRDNAKNTVYLQMNSLKPEDTAVYYCAAVIGSTVDSYSPSDPLEYDYWGQGTQVTVS

SEQ ID NO: 1991 - protein, 127 aa, Homo sapiens
MADVQLVESGGGLVQAGGSLRLSCTASGRTFSTYTMARFRQAPGKEREFVAAISWSGAYYAESVKGRFTISRDNAKNTVYLQMNSLKPEDTAVYYCAAVIGSTVDSYSPSDPLEYDYWGQGTQVTVS

SEQ ID NO: 1992 - protein, 127 aa, Homo sapiens
MADVQLVESGGGLVQAGGSLRLSCTASGRTFSTYSMAWFRQAPGKEREFVAAISWSGAYYLDSVKGRFTISRDNAKNTVYLQMNSLKAEDTAVYYCAAVIGSTVDSYSPSDPLEYDYWGQGTQVTVS

SEQ ID NO: 1993 - protein, 127 aa, Homo sapiens
MADVQLVESGGGLVQAGGSLRLSCTASGRTFSTYAMAWFRQAPGKEREFVAAISWTGAYYLDSVKGRFTISRDNAKNTMYLQMNSLKPEDTAVYYCAAVIGSTVDSYSPSDPLEYDYWGQGTQVTVS

SEQ ID NO: 1994 - protein, 127 aa, Homo sapiens
MADVQLVESGGGLVQAGGSLRLSCTASGRTFSTYAMAWFRQAPGKEREFVAAISWSGVDYSESVKGRFTISRDNAKNTVYLQMNSLKPEDTAVYYCAAVIGSTVDSYSPSDPLEYDYWGQGTQVTVS

SEQ ID NO: 1995 - protein, 127 aa, Homo sapiens
MADVQLVESGGGLVQAGGSLRLSCTASGRTFSTYAMAWFRQAPGKEREFVAAISWSGAYYLDSVKGRFTISRDNAKNTVYLQMNSLKPEDTAVYYCAAVIGSTVDSYSPSDPLEYDYWGQGTQVTVS

SEQ ID NO: 1996 - protein, 127 aa, Homo sapiens
MADVQLVESGGGLVQAGGSLRLSCTASGRTFSTYAMAWFRQAPGKEREFVAAISWSGAYYLDSVKGRFTISRDNAKNTLYLQMNSLKPEDTAVYYCAAVIGSTVDSYNPSDPLEYDYWGQGTQVTVS

SEQ ID NO: 1997 - protein, 127 aa, Homo sapiens
MADVQLVESGGGLVQAGGSLRLSCTASGRTFNTYTMAWFRQAPGKEREFVAAISWSGTYYADSVKGRFTISRDNAKNTVYLQMNSLKPEDTAVYYCAAVIGSTVDSYSPSDPLEYDYWGQGTQVTVS

SEQ ID NO: 1998 - protein, 122 aa, Homo sapiens
MADVQLVESGGGLVQAGGSLRLSCQASGRTFDSGPMAWFRQAPGKEREFVAAIRRSPERIYYADSVKGRFTISRDNAKNTVYLQMNNLKPEDTAVYYCAAALSRSTSVDYDYWGQGTQVTVS

SEQ ID NO: 1999 - protein, 126 aa, Homo sapiens
MADVQLVESGGGLVQAGGSLRLSCAVSGVSFRNMGWFRQAPGKEREFVAAISWSGDSTVYVDSVKGRVTISRDNAKNTVYLEMNSLKPEDTAVYYCAADGRFRAGQIGPSLGLYHYWGQGTQVTVS

SEQ ID NO: 2000 - protein, 126 aa, Homo sapiens
MADVQLVESGGGLVQAGGSLRLSCAVSGVSFRNMGWFRQAPGKEREFVAAISWSGDSTVYADSVKGRVTISRDNAKNTVYLEMNTLKPEDTAVYYCAADGRFRAGQIGPSLGLYHYWGQGTQVTVS

SEQ ID NO: 2001 - protein, 126 aa, Homo sapiens
MADVQLVESGGGLVQAGGSLRLSCAVSGVSFRNMGWFRQAPGKEREFVAAISWSGDSTVYADSVKGRVTISRDNAKNTVYLEMNSLKPEDTAVYYCAADGRFRAGQIGPSLGLYHYWGQGTQVTVS

SEQ ID NO: 2002 - protein, 126 aa, Homo sapiens
MADVQLVESGGGLVQAGGSLRLSCAVSGVSFRNMGWFRQAPGKEREFVAAISWGGDSTIYGDSVKGRVTISRDNAKNTAYLEMNSLKPEDTAVYYCAADGRFRAGRISSDLGLYHYWGQGTQVTVS

SEQ ID NO: 2003 - protein, 126 aa, Homo sapiens
MADVQLVESGGGLVQAGGSLRLSCAGSGRSFSSYDMGWFRRAPGKEREFVAAITGSRGSTYYADSVKGRFTISRDNAKNTVYLQMNSLKPEDTAVYYCAAGFGSVDGLEYSGSYDDWGQGTQVTVS

SEQ ID NO: 2004 - protein, 126 aa, Homo sapiens
MADVQLVESGGGLVQAGGSLRLSCAGSGRSFSSYDMGWFRRAPGKEREFVAAISGSRGSTYYADSVKGRFTISRDNAKNTVYLQMNSLKPEDTAVYYCAAGFGSVDGLEYSGSYDDWGQGTQVTVS

SEQ ID NO: 2005 - protein, 131 aa, Homo sapiens
MADVQLVESGGGLVQAGGSLRLSCADAASGRTFSTYTMGWFRQAPGKEREFVAHINWDGSNTYYADSVKGRFTISRDNAKNTMYLQMNSLKPEDTAVYYCAAAIGSTVDSYRHSDPLEYDYWGQGTQVTVS

SEQ ID NO: 2006 - protein, 116 aa, Homo sapiens
MADVQLVESGGGLVQAGGSLRLSCAASVSAFSSVPFAWYRQAPGKQRESVARIWLSDTGTYSDSVRGRFTISRDNAKQTLFLEMNSLKPEDTAVYYCNSWPNQNYAWGQGTQVTVS

SEQ ID NO: 2007 - protein, 124 aa, Homo sapiens
MADVQLVESGGGLVQAGGSLRLSCAASGSIGSINIMGWYRQAPGKQRELVASITTGGATNYADSVKGRFTISRDNAKNTVYLQMNSLKPEDTAVYYCNLDRGTHLGDSFERDDYWGRGTQVTVS

SEQ ID NO: 2008 - protein, 124 aa, Homo sapiens
MADVQLVESGGGLVQAGGSLRLSCAASGSIGSINIMGWYRQAPGKQRELVASITSGGATNYADSVKGRFTISRDNAKNTVYLQMNSLKPEDTAVYYCNLDRGTHLGDSFERDDYWGRGTQVTVS

SEQ ID NO: 2009 - protein, 124 aa, Homo sapiens
MADVQLVESGGGLVQAGGSLRLSCAASGSIGSINIMGWYRQAPGKQRELVASITSGGATNYADSVKGRFTISRDNAKNTMYLQMNSLKPEDTAVYYCNLDRGTHLGDSFERDDYWGRGTQVTVS

SEQ ID NO: 2010 - protein, 124 aa, Homo sapiens
MADVQLVESGGGLVQAGGSLRLSCAASGSIGSINIMGWYRQAPGKQRELVASITSGGATNYADSVKGRFTISRDNAKNAVYLQMNSLKPEDTAVYYCNLDRGTHLGDSFERDDYWGRGTQVTVS

SEQ ID NO: 2011 - protein, 124 aa, Homo sapiens
MADVQLVESGGGLVQAGGSLRLSCAASGSIGSINIMGWYRQAPGKQRELVASITSGGATNYADSVKGRFTISRDNAKNAVYLQMNSLKPEDTAVYYCNLARGTHLGDSFERDDYWGRGTQVTVS

SEQ ID NO: 2012 - protein, 129 aa, Homo sapiens
MADVQLVESGGGLVQAGGSLRLSCAASGRTLMRYTMGWFRQAPGLERDFVAEISWSGGNTGYADSVKGRFTISRDNAKNTVYLQMNSLKPQDTAVYYCAAVIGSPTDYSDYRSSLDYDYWGQGTQVTVS

SEQ ID NO: 2013 - protein, 129 aa, Homo sapiens
MADVQLVESGGGLVQAGGSLRLSCAASGRTFTHLNMGWFRQAPGKEREFTAHINWSGGSTNYADSVKGRFTISRDNAKNTVYLQMNSLKPEDTAVYYCAATLGDSVDLDSDADPRGYDYWGQGTQVTVS

SEQ ID NO: 2014 - protein, 128 aa, Homo sapiens
MADVQLVESGGGLVQAGGSLRLSCAASGRTFSTYVMAWFRQAPGKEREFVAAISWNGSTYYADSVKGRFTISRDNAKNTVYLQMNSLSPEDTAVYYCAAAIGSTVDSYSPSDPLEYDYWGQGTQVTVS

SEQ ID NO: 2015 - protein, 129 aa, Homo sapiens
MADVQLVESGGGLVQAGGSLRLSCAASGRTFSTYTMGWFRQAPGKEREFVAHISWSGSTTYYADSVKGRFTISRDNAKNTMYLQMNSLKPEDTSVYYCAVAIGSPVDSYRHSDPLEYDYWGQGTQVTVS

SEQ ID NO: 2016 - protein, 128 aa, Homo sapiens
MADVQLVESGGGLVQAGGSLRLSCAASGRTFSTYTMGWFRQAPGKEREFVAAVTWSETLYSDSVKGRFTISRDNAKNTVYLQMNSLKPEDTAVYYCAAVQGSPVDTIVVLTTSEEYDYWGQGTQVTVS

SEQ ID NO: 2017 - protein, 127 aa, Homo sapiens
MADVQLVESGGGLVQAGGSLRLSCAASGRTFSTYTMAWFRQAPGKEREFVAAITWSGTYYADSVKGRFTISRDNAKNTMYLQMNSLKPEDTAVYICAAVIGSTVDSYSPSDPLEYDYWGQGTQVTVS

SEQ ID NO: 2018 - protein, 127 aa, Homo sapiens
MADVQLVESGGGLVQAGGSLRLSCAASGRTFSTYTMAWFRQAPGKEREFVAAISWSGTYYADSVKGRFTISRDNAKNTVYLQMNSLKPEDTAVYYCAAVIGSTVDSYSPSDPLEYDYWGQGTQVTVS

SEQ ID NO: 2019 - protein, 127 aa, Homo sapiens
MADVQLVESGGGLVQAGGSLRLSCAASGRTFSTYTMAWFRQAPGKEREFVAAISWSGAYYAESVKGRFTISRDNAKNTVYLQMNSLKPEDTAVYYCAAVIGSTVDSYSPSDPLEYDYWGQGTQVTVS

SEQ ID NO: 2020 - protein, 129 aa, Homo sapiens
MADVQLVESGGGLVQAGGSLRLSCAASGRTFSTYTMAWFRQAPGKEREFVAAISWNGGSTYYADSVKGRFTIFRDNAKNMVYLQMNNLKPEDTAVYYCAAAIGSTVDSYDPGDPLEYDYWGQGTQVTVS

SEQ ID NO: 2021 - protein, 127 aa, Homo sapiens
MADVQLVESGGGLVQAGGSLRLSCAASGRTFSTYTMAWFRQAPGKERDFVAAISWSGAYYADSVKGRFTISRDNAKNTVYLQMNSLKPEDTAVYYCAAVIGSTVDSYSPSDPLDYDYWGQGTQVTVS

SEQ ID NO: 2022 - protein, 127 aa, Homo sapiens
MADVQLVESGGGLVQAGGSLRLSCAASGRTFSTYTLGWFRQAPGKEREFVGTITWSGSSTADSVKGRFTISRDNAKNTVYLQMNSLKPEDTAVYYCAAAIGSSVDSDYPSDPLEYDYWGQGTQVTVS

SEQ ID NO: 2023 - protein, 127 aa, Homo sapiens
MADVQLVESGGGLVQAGGSLRLSCAASGRTFSTYTLGWFRQAPGKEREFVGAITWSGSSTADSVKGRFTISRDNAKNTVYLQMNSLKPEDTAVYYCAAAIGSSVDSYYPSDPLEYDYWGQGTQVTVS

SEQ ID NO: 2024 - protein, 127 aa, Homo sapiens
MADVQLVESGGGLVQAGGSLRLSCAASGRTFSTYTLGWFRQAPGKEREFVGAITWSGGTTADSVKGRFSISRDNAKNTVYLQMNSLKPEDTAVYYCAAVIGSTVDSYDPSDPIEYDYWGQGTQVTVS

SEQ ID NO: 2025 - protein, 127 aa, Homo sapiens
MADVQLVESGGGLVQAGGSLRLSCAASGRTFSTYTLGWFRQAPGKEREFVGAITWSGGTTADSVKGRFNISRDNAKNTVYLQMNSLKPEDTAVYYCAAVIGSTVDSYDPSDPIEYDYWGQGTQVTVS

SEQ ID NO: 2026 - protein, 127 aa, Homo sapiens
MADVQLVESGGGLVQAGGSLRLSCAASGRTFSTYTLGWFRQAPGKEREFVGAITWSGGTTADSVKGQFSISRDNAKNTVYLQMNSLKPEDTAVYYCAAVIGSTVDSYDPSDPIEYDYWGQGTQVTVS

SEQ ID NO: 2027 - protein, 128 aa, Homo sapiens
MADVQLVESGGGLVQAGGSLRLSCAASGRTFSTYTLGWFRQAPGKEREFVAAITWSSGTYYADSVKGRFTISRDNAKNTVYLQMNSLKPEDTAVYYCAAVIGSTVDTYNPGDPLEYDYWGQGTQVTVS

SEQ ID NO: 2028 - protein, 128 aa, Homo sapiens
MADVQLVESGGGLVQAGGSLRLSCAASGRTFSTYTLGWFRQAPGKEREFVAAITWSAGTYYADSMKGRFTISRDNAKNTVYLQMNSLKPEDTAVYYCAAVIGSTVDTYNPGDPLEYDYWGQGTQVTVS

SEQ ID NO: 2029 - protein, 128 aa, Homo sapiens
MADVQLVESGGGLVQAGGSLRLSCAASGRTFSTYTLGWFRQAPGKEREFVAAINWSSGTYYADSVKGRFTISRDNAKNTVYLQMNSLKPEDTAVYYCAAVIGSTVDTYNPGDPLEYDYWGQGTQVTVS

SEQ ID NO: 2030 - protein, 129 aa, Homo sapiens
MADVQLVESGGGLVQAGGSLRLSCAASGRTFSTYTLGWFRQAPGKEREFVAAINWSGGTTYYADSVKGRFTISRNNAKNTVYLQMNSLKPEDTAVYYCAAVIGSTVDSYDPGDPLEYDYWGQGTQVTVS

SEQ ID NO: 2031 - protein, 127 aa, Homo sapiens
MADVQLVESGGGLVQAGGSLRLSCAASGRTFSTYTLAWFRQAPGKEREFVGAITWSGASTADSVKGRFTISRDNAKNTVYLQMNSLKPEDTAVYYCAAAIGSTVDSYHPSDPLDYDYWGQGTQVTVS

SEQ ID NO: 2032 - protein, 127 aa, Homo sapiens
MADVQLVESGGGLVQAGGSLRLSCAASGRTFSTYSLGWFRQAPGKEREFVGAISWSGSTTADSVKGRFTISRDNAKNTVYLQMNNLKPEDTAVYYCAAAIGSTVDSYNPSDPLEYDYWGQGTQVTVS

SEQ ID NO: 2033 - protein, 129 aa, Homo sapiens
MADVQLVESGGGLVQAGGSLRLSCAASGRTFSTYEMAWFRQAPGKEREFVAAINWSGSSTYYADSVKGRFTISRDNAKNTVYLQMNSLKPEDTVVYVCAAVIGSTVDEYRPSDPLEYDYWGQGTQVTVS

SEQ ID NO: 2034 - protein, 129 aa, Homo sapiens
MADVQLVESGGGLVQAGGSLRLSCAASGRTFSTYEMAWFRQAPGKEREFVAAINWSGSSTYYADSVKGRFTISRDNAKNTVYLQMNSLKPEDTAVYVCAAVIGSTVDEYRPSDPLEYDYWGQGTQVTVS

SEQ ID NO: 2035 - protein, 129 aa, Homo sapiens
MADVQLVESGGGLVQAGGSLRLSCAASGRTFSSYTMGWFRQAPGLERDFVAEISWNGGSTGYADSVKGRFTISRDNAKNTVYLQMNSLKPQDTAVYYCAAVIGSPTDSSDYRSSLDYDYWGQGTQVTVS

SEQ ID NO: 2036 - protein, 129 aa, Homo sapiens
MADVQLVESGGGLVQAGGSLRLSCAASGRTFSSYTMGWFHQAPGKEREFVAEISGTGGNTGYSDSVKGRFTISRDNAKNTVYLQMNSLKLEDTAVYYCAAVLGSPTDSSDYRSTLDYDYWGQGTQVTVS

SEQ ID NO: 2037 - protein, 129 aa, Homo sapiens
MADVQLVESGGGLVQAGGSLRLSCAASGRTFSSYTMGWFHQAPGKEREFVAEISGTGGNTGYADSVKGRFTISRDNAKNTVYLQMNTLKPEDTAVYYCAAVIGSPTDSSDYRSSLDYDYWGQGTQVTVS

SEQ ID NO: 2038 - protein, 129 aa, Homo sapiens
MADVQLVESGGGLVQAGGSLRLSCAASGRTFSSYTMGWFHQAPGKEREFVAEISGTGGNTGYADSVKGRFTISRDNAKNTVYLQMNSLKPEDTAAYYCAAVIGSPTDSSDYRSSLDYDYWGQGTQVTVS

SEQ ID NO: 2039 - protein, 129 aa, Homo sapiens
MADVQLVESGGGLVQAGGSLRLSCAASGRTFSSYTMGWFHQAPGKERDFVAEISGTGGNIGYADSVKGRFTISRDNAKNTVYLQMNSLKPEDTAIYYCAAVIGSPTDSSDYRSSLDYDYWGQGTQVTVS

SEQ ID NO: 2040 - protein, 130 aa, Homo sapiens
MADVQLVESGGGLVQAGGSLRLSCAASGRTFSSLDMGWFRQRPGKERDVVATINWTGDSTYYLDSVKGRFTISRDNAKNTVFLQMNSLKPEDTAVYYCAARGGGSSVDSEYDVGEFEYDYWGQGTQVTVS

SEQ ID NO: 2041 - protein, 129 aa, Homo sapiens
MADVQLVESGGGLVQAGGSLRLSCAASGRTFSRYTMGWFHQAPGKEREFVAEISGTGGNTGYADSVKGRFTMSRDNAKNTVYLQMNSLKPEDTGVYYCAAVIGSPTDSSDYRSSLDYDYWGQGTQVTVS

SEQ ID NO: 2042 - protein, 119 aa, Homo sapiens
MADVQLVESGGGLVQAGGSLRLSCAASGRTFSRVGWFHQPAPEKRREVVAAISWRSGDTYYTHFVEGRFTISRDNAKNTVYLQMNSLTPEDTAVYYCAASDKSTGPYEYWGQGTQVTVS

SEQ ID NO: 2043 - protein, 119 aa, Homo sapiens
MADVQLVESGGGLVQAGGSLRLSCAASGRTFSRVGWFHQPAPEKRREVVAAISWRSGDTYYTHFVEGQFTISRDNAKNTVYLQMNSLTPEDTAVYYCAASDKSTGPYEYWGQGTQVTVS

SEQ ID NO: 2044 - protein, 126 aa, Homo sapiens
MADVQLVESGGGLVQAGGSLRLSCAASGRTFSDYTMGWFRRAPGKEREFVATISTGGGSTKYADSVKGRFTISRDNTKNMVYLQMNSLKPEDTAVYYCAASLRGYYSGSYSREYDYWGQGTQVTVS

SEQ ID NO: 2045 - protein, 126 aa, Homo sapiens
MADVQLVESGGGLVQAGGSLRLSCAASGRTFSDYTMGWFRRAPGKEREFVATISTGGGSTKYADSVKGRFTISRDNAKNMVYLQMNSLKPEDTTVYYCAASHRGYYSGSYSREYDDWGQGTQVTVS

SEQ ID NO: 2046 - protein, 126 aa, Homo sapiens
MADVQLVESGGGLVQAGGSLRLSCAASGRTFSDYTMGWFRRAPGKEREFVATISTGGGSTKYADSVKGRFTISRDNAKNMVYLQMNSLKPEDTAVYYCAASHRGYYSGSYSREYDNWGQGTQVTVS

SEQ ID NO: 2047 - protein, 126 aa, Homo sapiens
MADVQLVESGGGLVQAGGSLRLSCAASGRTFSDYTMGWFRRAPGKEREFVATISTGGGSTKYADSVKGRFTISRDNAKNMVYLQMNSLKPEDTAVYYCAASHRGYYSGSYSREYDDWGQGTQVTVS

SEQ ID NO: 2048 - protein, 126 aa, Homo sapiens
MADVQLVESGGGLVQAGGSLRLSCAASGRTFSDWTMGWFRRAPGKEREFVATISTGGGSTKYADSVKGRFTISRDNAKNMVYLQMNSLKPEDTAVYYCAASHRGYYSGSYSREYDNWGQGTQVTVS

SEQ ID NO: 2049 - protein, 129 aa, Homo sapiens
MADVQLVESGGGLVQAGGSLRLSCAASGRTFRYYSMGWFRQAPGKEREFVSAISWSGDSTYYGDSVKGRFTISRDNAKNTVYLQMDSLKPEDTAVYYCAGAFGSTVDNYDPSDPREYDTWGQGTQVTVS

SEQ ID NO: 2050 - protein, 126 aa, Homo sapiens
MADVQLVESGGGLVQAGGSLRLSCAASGRTFRSYTMGWFRQAPGKEREFVAAISWSGGSTYYADSVKGRFTISRDNAKTTVYLQMNSLKPEDTAVYYCAASKYYSGNYYSQVRYDYWGQGTQVTVS

SEQ ID NO: 2051 - protein, 134 aa, Homo sapiens
MADVQLVESGGGLVQAGGSLRLSCAASGRTFGMSTMGWFRQAPGKERELVSTISIIWRDGRTQSGGRTHYADSVKGRFTISRDDAKNTVYLQMDSLKPEDTALYYCAARFGSSVDVIIPDDYDYWGQGTQVTVS

SEQ ID NO: 2052 - protein, 125 aa, Homo sapiens
MADVQLVESGGGLVQAGGSLRLSCAASGRSFSSYSMGWFRQAPGKDREFVAAITARGMNPYYTDSVKGRFIISRDNAKNALYLQMNSLKREDTAVYYCVGRFRGDWGTQDAKWDYWGQGTQVTVS

SEQ ID NO: 2053 - protein, 126 aa, Homo sapiens
MADVQLVESGGGLVQAGGSLRLSCAASGRSFSSYDMGWFRRAPGKEREFVAAISGSRGSTDYSDSVKGRFTISRDNAKNTVYLQMNRLKPEDTAVYYCAAGFGSVDGLEYPISYDDWGQGTQVTVS

SEQ ID NO: 2054 - protein, 126 aa, Homo sapiens
MADVQLVESGGGLVQAGGSLRLSCAASGRSFSSLDMGWFRRAPGKEREFVAAISGSRGSTDYSDSVKGRFTISRDNAKNTVYLQMNRLKPEDAAVYYCAAGFGSVDGLEYPISYDDWGQGTQVTVS

SEQ ID NO: 2055 - protein, 130 aa, Homo sapiens
MADVQLVESGGGLVQAGGSLRLSCAASGRSFSSLDMGWFRQRPGKERDVVATINWTGDSTYYLDSVKGRFTISRDNAKNTVFLQMNSLKPEDTAVYYCAARGGGSSVDSEYDVGEFEYDYWGQGTQVTVS

SEQ ID NO: 2056 - protein, 126 aa, Homo sapiens
MADVQLVESGGGLVQAGGSLRLSCAASGRSFSSLDMDWFRRAPGKEREFVAAISGSRGSTDYSDSVKGRFTISRDNAKNTVYLQMNRLKPEDAAVYYCAAGFGSVDGLEYPISYDDWGQGTQVTVS

SEQ ID NO: 2057 - protein, 127 aa, Homo sapiens
MADVQLVESGGGLVQAGGSLRLSCAASGRSFDRYTMAWFRQGPGKEREFVATVGWNDNSIYYADSVKGRFTISRDNAKNTVYLQMNSLKPEDTAVYYCAATFGSPVDTPLDRGAYDFWGQGTQVTVS

SEQ ID NO: 2058 - protein, 130 aa, Homo sapiens
MADVQLVESGGGLVQAGGSLRLSCAASGRPFSSMDMGWFRQRPGKERDVVATINWTGDSTYYLDSVKGRFTISRDNAKNTVFLQMNSLKPEDTAVYYCAARGGGSSVDSEYDVGEFEYDYWGQGTQVTVS

SEQ ID NO: 2059 - protein, 130 aa, Homo sapiens
MADVQLVESGGGLVQAGGSLRLSCAASGRPFSSLYMGWFRQRPGKERDVVATINWTGDSTYYLDSVKGRFTISRDNAKNTVFLQMNSLKPEDTAVYYCAARGGGSSVDSEYDVGEFEYDYWGQGTQVTVS

SEQ ID NO: 2060 - protein, 130 aa, Homo sapiens
MADVQLVESGGGLVQAGGSLRLSCAASGRPFSSLNMGWFRQRPGKERDVVATINWTGDSTYYLDSVKGRFTISRDNAKNTVFLQMNSLKPEDTAVYYCAARGGGSSVDSEYDVGEFEYDYWGQGTQVTVS

SEQ ID NO: 2061 - protein, 130 aa, Homo sapiens
MADVQLVESGGGLVQAGGSLRLSCAASGRPFSSLDVGWFRQAPGKEREFVATISWTGGSTYYADSVKGRFTISRDNAKNTVYLQMNSLKPEDTAVYYCAARGGGTSVDSDYDVEEFEYDYWGQGTQVTVS

SEQ ID NO: 2062 - protein, 130 aa, Homo sapiens
MADVQLVESGGGLVQAGGSLRLSCAASGRPFSSLDMGWYRQAPGKEREFVATISWTGGSTYYADSVKGRFTISRDNAKNTVYLQMNSLKPEDTAVYYCAARGGGTSVDSDYDVEEFEYDYWGQGTQVTVS

SEQ ID NO: 2063 - protein, 130 aa, Homo sapiens
MADVQLVESGGGLVQAGGSLRLSCAASGRPFSSLDMGWLRQRPGKERDVVATINWTGDSTYYLDSVKGRFTISRDNAKNTVFLQMNSLKPEDTAVYYCAARGGGSSVDSEYDVGEFEYDYWGQGTQVTVS

SEQ ID NO: 2064 - protein, 130 aa, Homo sapiens
MADVQLVESGGGLVQAGGSLRLSCAASGRPFSSLDMGWFRQRPGKERDVVSTINWTGDSTYYLDSVKGRFTISRDNAKNTVFLQMNSLKPEDTAVYYCAARGGGSSVDSEYDVGEFEYDYWGQGTQVTVS

SEQ ID NO: 2065 - protein, 130 aa, Homo sapiens
MADVQLVESGGGLVQAGGSLRLSCAASGRPFSSLDMGWFRQRPGKERDVVATINWTSDSTYYLDSVKGRFTISRDNAKNTVFLQMNSLKPEDTAVYYCAARGGGSSVDSEYDVGEFEYDYWGQGTQVTVS

SEQ ID NO: 2066 - protein, 130 aa, Homo sapiens
MADVQLVESGGGLVQAGGSLRLSCAASGRPFSSLDMGWFRQRPGKERDVVATINWTGVSTYYLDSVKGRFTISRDNAKNTVFLQMNSLKPEDTAVYYCAARGGGSSVDSEYDVGEFEYDYWGQGTQVTVS

SEQ ID NO: 2067 - protein, 130 aa, Homo sapiens
MADVQLVESGGGLVQAGGSLRLSCAASGRPFSSLDMGWFRQRPGKERDVVATINWTGDYTYYLDSVKGRFTISRDNAKNTVFLQMNSLKPEDTAVYYCAARGGGSSVDSEYDVGEFEYDYWGQGTQVTVS

SEQ ID NO: 2068 - protein, 130 aa, Homo sapiens
MADVQLVESGGGLVQAGGSLRLSCAASGRPFSSLDMGWFRQRPGKERDVVATINWTGDSTYYSDSVKGRFTISRDNAKNTVFLQMNSLKPEDTAVYYCAARGGGSSVDSEYDVGEFEYDYWGQGTQVTVS

SEQ ID NO: 2069 - protein, 130 aa, Homo sapiens
MADVQLVESGGGLVQAGGSLRLSCAASGRPFSSLDMGWFRQRPGKERDVVATINWTGDSTYYLDYVKGRFTISRDNAKNTVFLQMNSLKPEDTAVYYCAARGGGSSVDSEYDVGEFEYDYWGQGTQVTVS

SEQ ID NO: 2070 - protein, 130 aa, Homo sapiens
MADVQLVESGGGLVQAGGSLRLSCAASGRPFSSLDMGWFRQRPGKERDVVATINWTGDSTYYLDSVNGRFTISRDNAKNTVFLQMNSLKPEDTAVYYCAARGGGSSVDSEYDVGEFEYDYWGQGTQVTVS

SEQ ID NO: 2071 - protein, 130 aa, Homo sapiens
MADVQLVESGGGLVQAGGSLRLSCAASGRPFSSLDMGWFRQRPGKERDVVATINWTGDSTYYLDSVKGRSTISRDNAKNTVFLQMNSLKPEDTAVYYCAARGGGSSVDSEYDVGEFEYDYWGQGTQVTVS

SEQ ID NO: 2072 - protein, 130 aa, Homo sapiens
MADVQLVESGGGLVQAGGSLRLSCAASGRPFSSLDMGWFRQRPGKERDVVATINWTGDSTYYLDSVKGRLTISRDNAKNTVFLQMNSLKPEDTAVYYCAARGGGSSVDSEYDVGEFEYDYWGQGTQVTVS

SEQ ID NO: 2073 - protein, 130 aa, Homo sapiens
MADVQLVESGGGLVQAGGSLRLSCAASGRPFSSLDMGWFRQRPGKERDVVATINWTGDSTYYLDSVKGRFTVSRDNAKNTVFLQMNSLKPEDTAVYYCAARGGGSSVDSEYDVGEFEYDYWGQGTQVTVS

SEQ ID NO: 2074 - protein, 130 aa, Homo sapiens
MADVQLVESGGGLVQAGGSLRLSCAASGRPFSSLDMGWFRQRPGKERDVVATINWTGDSTYYLDSVKGRFTITRDNAKNTVFLQMNSLKPEDTAVYYCAARGGGSSVDSEYDVGEFEYDYWGQGTQVTVS

SEQ ID NO: 2075 - protein, 130 aa, Homo sapiens
MADVQLVESGGGLVQAGGSLRLSCAASGRPFSSLDMGWFRQRPGKERDVVATINWTGDSTYYLDSVKGRFTISRGNAKNTVFLQMNSLKPEDTAVYYCAARGGGSSVDSEYDVGEFEYDYWGQGTQVTVS

SEQ ID NO: 2076 - protein, 130 aa, Homo sapiens
MADVQLVESGGGLVQAGGSLRLSCAASGRPFSSLDMGWFRQRPGKERDVVATINWTGDSTYYLDSVKGRFTISRDSAKNTVFLQMNSLKPEDTAVYYCAARGGGSSVDSEYDVGEFEYDYWGQGTQVTVS

SEQ ID NO: 2077 - protein, 130 aa, Homo sapiens
MADVQLVESGGGLVQAGGSLRLSCAASGRPFSSLDMGWFRQRPGKERDVVATINWTGDSTYYLDSVKGRFTISRDNTKNTVFLQMNSLKPEDTAVYYCAARGGGSSVDSEYDVGEFEYDYWGQGTQVTVS

SEQ ID NO: 2078 - protein, 130 aa, Homo sapiens
MADVQLVESGGGLVQAGGSLRLSCAASGRPFSSLDMGWFRQRPGKERDVVATINWTGDSTYYLDSVKGRFTISRDNSKNTVFLQMNSLKPEDTAVYYCAARGGGSSVDSEYDVGEFEYDYWGQGTQVTVS

SEQ ID NO: 2079 - protein, 130 aa, Homo sapiens
MADVQLVESGGGLVQAGGSLRLSCAASGRPFSSLDMGWFRQRPGKERDVVATINWTGDSTYYLDSVKGRFTISRDNAKSTVFLQMNSLKPEDTAVYYCAARGGGSSVDSEYDVGEFEYDYWGQGTQVTVS

SEQ ID NO: 2080 - protein, 130 aa, Homo sapiens
MADVQLVESGGGLVQAGGSLRLSCAASGRPFSSLDMGWFRQRPGKERDVVATINWTGDSTYYLDSVKGRFTISRDNAKNTVILQMNSLKPEDTAVYYCAARGGGSSVDSEYDVGEFEYDYWGQGTQVTVS

SEQ ID NO: 2081 - protein, 130 aa, Homo sapiens
MADVQLVESGGGLVQAGGSLRLSCAASGRPFSSLDMGWFRQRPGKERDVVATINWTGDSTYYLDSVKGRFTISRDNAKNTVFPQMNSLKPEDTAVYYCAARGGGSSVDSEYDVGEFEYDYWGQGTQVTVS

SEQ ID NO: 2082 - protein, 130 aa, Homo sapiens
MADVQLVESGGGLVQAGGSLRLSCAASGRPFSSLDMGWFRQRPGKERDVVATINWTGDSTYYLDSVKGRFTISRDNAKNTVFLQMSSLKPEDTAVYYCAARGGGSSVDSEYDVGEFEYDYWGQGTQVTVS

SEQ ID NO: 2083 - protein, 130 aa, Homo sapiens
MADVQLVESGGGLVQAGGSLRLSCAASGRPFSSLDMGWFRQRPGKERDVVATINWTGDSTYYLDSVKGRFTISRDNAKNTVFLQMNSRKPEDTAVYYCAARGGGSSVDSEYDVGEFEYDYWGQGTQVTVS

SEQ ID NO: 2084 - protein, 130 aa, Homo sapiens
MADVQLVESGGGLVQAGGSLRLSCAASGRPFSSLDMGWFRQRPGKERDVVATINWTGDSTYYLDSVKGRFTISRDNAKNTVFLQMNSQKPEDTAVYYCAARGGGSSVDSEYDVGEFEYDYWGQGTQVTVS

SEQ ID NO: 2085 - protein, 130 aa, Homo sapiens
MADVQLVESGGGLVQAGGSLRLSCAASGRPFSSLDMGWFRQRPGKERDVVATINWTGDSTYYLDSVKGRFTISRDNAKNTVFLQMNSPKPEDTAVYYCAARGGGSSVDSEYDVGEFEYDYWGQGTQVTVS

SEQ ID NO: 2086 - protein, 130 aa, Homo sapiens
MADVQLVESGGGLVQAGGSLRLSCAASGRPFSSLDMGWFRQRPGKERDVVATINWTGDSTYYLDSVKGRFTISRDNAKNTVFLQMNSMKPEDTAVYYCAARGGGSSVDSEYDVGEFEYDYWGQGTQVTVS

SEQ ID NO: 2087 - protein, 130 aa, Homo sapiens
MADVQLVESGGGLVQAGGSLRLSCAASGRPFSSLDMGWFRQRPGKERDVVATINWTGDSTYYLDSVKGRFTISRDNAKNTVFLQMNSLNPEDTAVYYCAARGGGSSVDSEYDVGEFEYDYWGQGTQVTVS

SEQ ID NO: 2088 - protein, 130 aa, Homo sapiens
MADVQLVESGGGLVQAGGSLRLSCAASGRPFSSLDMGWFRQRPGKERDVVATINWTGDSTYYLDSVKGRFTISRDNAKNTVFLQMNSLKTEDTAVYYCAARGGGSSVDSEYDVGEFEYDYWGQGTQVTVS

SEQ ID NO: 2089 - protein, 130 aa, Homo sapiens
MADVQLVESGGGLVQAGGSLRLSCAASGRPFSSLDMGWFRQRPGKERDVVATINWTGDSTYYLDSVKGRFTISRDNAKNTVFLQMNSLKPGDTAVYYCAARGGGSSVDSEYDVGEFEYDYWGQGTQVTVS

SEQ ID NO: 2090 - protein, 130 aa, Homo sapiens
MADVQLVESGGGLVQAGGSLRLSCAASGRPFSSLDMGWFRQRPGKERDVVATINWTGDSTYYLDSVKGRFTISRDNAKNTVFLQMNSLKPEDTVVYYCAARGGGSSVDSEYDVGEFEYDYWGQGTQVTVS

SEQ ID NO: 2091 - protein, 130 aa, Homo sapiens
MADVQLVESGGGLVQAGGSLRLSCAASGRPFSSLDMGWFRQRPGKERDVVATINWTGDSTYYLDSVKGRFTISRDNAKNTVFLQMNSLKPEDTTVYYCAARGGGSSVDSEYDVGEFEYDYWGQGTQVTVS

SEQ ID NO: 2092 - protein, 130 aa, Homo sapiens
MADVQLVESGGGLVQAGGSLRLSCAASGRPFSSLDMGWFRQRPGKERDVVATINWTGDSTYYLDSVKGRFTISRDNAKNTVFLQMNSLKPEDTDVYYCAARGGGSSVDSEYDVGEFEYDYWGQGTQVTVS

SEQ ID NO: 2093 - protein, 130 aa, Homo sapiens
MADVQLVESGGGLVQAGGSLRLSCAASGRPFSSLDMGWFRQRPGKERDVVATINWTGDSTYYLDSVKGRFTISRDNAKNTVFLQMNSLKPEDTAVYYCAARGGGTSVDSDYDVGEFEYDYWGQGTQVTVS

SEQ ID NO: 2094 - protein, 130 aa, Homo sapiens
MADVQLVESGGGLVQAGGSLRLSCAASGRPFSSLDMGWFRQRPGKERDVVATINWTGDSTYYLDSVKGRFTISRDNAKNTVFLQMNSLKPEDTAVYYCAARGGGSSVDSEYDVGEFQYDYWGQGTQVTVS

SEQ ID NO: 2095 - protein, 130 aa, Homo sapiens
MADVQLVESGGGLVQAGGSLRLSCAASGRPFSSLDMGWFRQRPGKERDVVATINWTGDSTYYLDSVKGRFTISRDNAKNTVFLQMNSLKPEDTAVYYCAARGGGSSVDSEYDVGEFKYDYWGQGTQVTVS

SEQ ID NO: 2096 - protein, 130 aa, Homo sapiens
MADVQLVESGGGLVQAGGSLRLSCAASGRPFSSLDMGWFRQRPGKERDVVATINWTGDSTYYLDSVKGRFTISRDNAKNTVFLQMNSLKPEDTAVYYCAARGGGSSVDSEYDVGEFGYDYWGQGTQVTVS

SEQ ID NO: 2097 - protein, 130 aa, Homo sapiens
MADVQLVESGGGLVQAGGSLRLSCAASGRPFSSLDMGWFRQRPGKERDVVATINWTGDSTYYLDSVKGRFTISRDNAKNTVFLQMNSLKPEDTAVYYCAARGGGSSVDSEYDVGEFEYYYWGQGTQVTVS

SEQ ID NO: 2098 - protein, 130 aa, Homo sapiens
MADVQLVESGGGLVQAGGSLRLSCAASGRPFSSLDMGWFRQRPGKERDVVATINWTGDSTYYLDSVKGRFTISRDNAKNTVFLQMNSLKPEDTAVYYCAARGGGSSVDSEYDVGEFEYNYWGQGTQVTVS

SEQ ID NO: 2099 - protein, 130 aa, Homo sapiens
MADVQLVESGGGLVQAGGSLRLSCAASGRPFSSLDMGWFRQRPGKERDVVATINWTGDSTYYLDSVKGRFTISRDNAKNTVFLQMNSLKPEDTAVYYCAARGGGSSVDSEYDVGEFEYGYWGQGTQVTVS

SEQ ID NO: 2100 - protein, 130 aa, Homo sapiens
MADVQLVESGGGLVQAGGSLRLSCAASGRPFSSLDMGWFRQRPGKERDVVATINWTGDSTYYLDSVKGRFTISRDNAKNTVFLQMNSLKPEDTAVYYCAARGGGSSVDSEYDVGEFEYDYWGRGTQVTVS

SEQ ID NO: 2101 - protein, 130 aa, Homo sapiens
MADVQLVESGGGLVQAGGSLRLSCAASGRPFSSLDMGWFRQRPGKERDVVATINWTGDSTYYLDSVKGRFTISRDNAKNTVFLQMNSLKPEDTAVYYCAARGGGSSVDSEYDVGEFEYDYWGQVTQVTVS

SEQ ID NO: 2102 - protein, 130 aa, Homo sapiens
MADVQLVESGGGLVQAGGSLRLSCAASGRPFSSLDMGWFRQRPGKERDVVATINWTGDSTYYLDSVKGRFTISRDNAKNTVFLQMNSLKPEDTAVYYCAARGGGSSVDSEYDVGEFEYDYWGQGTQVTVS

SEQ ID NO: 2103 - protein, 129 aa, Homo sapiens
MADVQLVESGGGLVQAGGSLRLSCAASGRPFSSLDMGWFRQRPGKERDVVATINWTGDSTYYLDSVKGRFTISRDNAKNTVFLQMNSLKPEDTAVYYCAARGGGSSVDSEYDVGEFEYDYWGQGPRSPS

SEQ ID NO: 2104 - protein, 130 aa, Homo sapiens
MADVQLVESGGGLVQAGGSLRLSCAASGRPFSSLDMGWFRQRPGKERDVVATINWTGDSTYYLDSVKGRFTISRDNAKNTVFLQMNSLKPEDTAVYYCAARGGGSSVDSEYDVGEFEYDYWGHGTQVTVS

SEQ ID NO: 2105 - protein, 130 aa, Homo sapiens
MADVQLVESGGGLVQAGGSLRLSCAASGRPFSSLDMGWFRQRPGKERDVVATINWTGDSTYYLDSVKGRFTISRDNAKNTVFLQMNSLKPEDTAVYYCAARGGGSSVDSEYDVGEFEYDYWDQGTQVTVS

SEQ ID NO: 2106 - protein, 130 aa, Homo sapiens
MADVQLVESGGGLVQAGGSLRLSCAASGRPFSSLDMGWFRQRPGKERDVVATINWTGDSTYYLDSVKGRFTISRDNAKNTVFLQMNSLKPEDTAVYYCAARGGGSSVDSEYDVGEFEYDYWCQGTQVTVS

SEQ ID NO: 2107 - protein, 129 aa, Homo sapiens
MADVQLVESGGGLVQAGGSLRLSCAASGRPFSSLDMGWFRQRPGKERDVVATINWTGDSTYYLDSVKGRFTISRDNAKNTVFLQMNSLKPEDTAVYYCAARGGGSSVDSEYDVGEFEYDYWARGPRSPS

SEQ ID NO: 2108 - protein, 130 aa, Homo sapiens
MADVQLVESGGGLVQAGGSLRLSCAASGRPFSSLDMGWFRQRPGKERDVVATINWTGDSTYYLDSVKGRFTISRDNAKNTVFLQMNSLKPEDTAVYYCAARGGGSSVDSEYDVGEFEYDYRGQGTQVTVS

SEQ ID NO: 2109 - protein, 130 aa, Homo sapiens
MADVQLVESGGGLVQAGGSLRLSCAASGRPFSSLDMGWFRQRPGKERDVVATINWTGDSTYYLDSVKGRFTISRDNAKNTVFLQMNSLKPEDTAVYYCAARGGGSSVDSEYDVGEFEYDYGGQGTQVTVS

SEQ ID NO: 2110 - protein, 130 aa, Homo sapiens
MADVQLVESGGGLVQAGGSLRLSCAASGRPFSSLDMGWFRQRPGKERDVVATINWTGDSTYYLDSVKGRFTISRDNAKNTVFLQMNSLKPEDTAVYYCAARGGGSSVDSEYDVGEFEYDHWGQGTQVTVS

SEQ ID NO: 2111 - protein, 130 aa, Homo sapiens
MADVQLVESGGGLVQAGGSLRLSCAASGRPFSSLDMGWFRQRPGKERDVVATINWTGDSTYYLDSVKGRFTISRDNAKNTVFLQMNSLKPEDTAVYYCAARGGGSSVDSEYDVGEFEYDDWGQGTQVTVS

SEQ ID NO: 2112 - protein, 130 aa, Homo sapiens
MADVQLVESGGGLVQAGGSLRLSCAASGRPFSSLDMGWFRQRPGKERDVVATINWTGDSTYYLDSVKGRFTISRDNAKNTVFLQMNSLKPEDTAVYYCAARGGGSSVDSEYDVGEFEYDCWGQGTQVTVS

SEQ ID NO: 2113 - protein, 130 aa, Homo sapiens
MADVQLVESGGGLVQAGGSLRLSCAASGRPFSSLDMGWFRQRPGKERDVVATINWTGDSTYYLDSVKGRFTISRDNAKNTVFLQMNSLKPEDTAVYYCAARGGGSSVDSEYDVGEFESDYWGQGTQVTVS

SEQ ID NO: 2114 - protein, 130 aa, Homo sapiens
MADVQLVESGGGLVQAGGSLRLSCAASGRPFSSLDMGWFRQRPGKERDVVATINWTGDSTYYLDSVKGRFTISRDNAKNTVFLQMNSLKPEDTAVYYCAARGGGSSVDSEYDVGEFEDDYWGQGTQVTVS

SEQ ID NO: 2115 - protein, 130 aa, Homo sapiens
MADVQLVESGGGLVQAGGSLRLSCAASGRPFSSLDMGWFRQRPGKERDVVATINWTGDSTYYLDSVKGRFTISRDNAKNTVFLQMNSLKPEDTAVYYCAARGGGSSVDSEYDVGEFECDYWGQGTQVTVS

SEQ ID NO: 2116 - protein, 130 aa, Homo sapiens
MADVQLVESGGGLVQAGGSLRLSCAASGRPFSSLDMGWFRQRPGKERDVVATINWTGDSTYYLDSVKGRFTISRDNAKNTVFLQMNSLKPEDTAVYYCAARGGGSSVDSEYDVGEFAYDYWGQGTQVTVS

SEQ ID NO: 2117 - protein, 130 aa, Homo sapiens
MADVQLVESGGGLVQAGGSLRLSCAASGRPFSSLDMGWFRQRPGKERDVVATINWTGDSTYYLDSVKGRFTISRDNAKNTVFLQMNSLKPEDTAIYYCAARGGGSSVDSEYDVGEFEYDYWGQGTQVTVS

SEQ ID NO: 2118 - protein, 130 aa, Homo sapiens
MADVQLVESGGGLVQAGGSLRLSCAASGRPFSSLDMGWFRQRPGKERDVVATINWTGDSTYYLDSVKGRFTISRDNAKNTVFLQMNSLKPEDMAVYYCAARGGGSSVDSEYDVGEFEYDYWGQGTQVTVS

SEQ ID NO: 2119 - protein, 130 aa, Homo sapiens
MADVQLVESGGGLVQAGGSLRLSCAASGRPFSSLDMGWFRQRPGKERDVVATINWTGDSTYYLDSVKGRFTISRDNAKNTVFLQMNSLKPEDAAVYYCAARGGGSSVDSEYDVGEFEYDYWGQGTQVTVS

SEQ ID NO: 2120 - protein, 130 aa, Homo sapiens
MADVQLVESGGGLVQAGGSLRLSCAASGRPFSSLDMGWFRQRPGKERDVVATINWTGDSTYYLDSVKGRFTISRDNAKNTVFLQMNSLKHEDTAVYYCAARGGGSSVDSEYDVGEFEYDYWGQGTQVTVS

SEQ ID NO: 2121 - protein, 130 aa, Homo sapiens
MADVQLVESGGGLVQAGGSLRLSCAASGRPFSSLDMGWFRQRPGKERDVVATINWTGDSTYYLDSVKGRFTISRDNAKNTVFLQMNRLKPEDTAVYYCAARGGGSSVDSEYDVGEFEYDYWGQGTQVTVS

SEQ ID NO: 2122 - protein, 130 aa, Homo sapiens
MADVQLVESGGGLVQAGGSLRLSCAASGRPFSSLDMGWFRQRPGKERDVVATINWTGDSTYYLDSVKGRFTISRDNAKNTVFLQINSLKPEDTAVYYCAARGGGSSVDSEYDVGEFEYDYWGQGTQVTVS

SEQ ID NO: 2123 - protein, 130 aa, Homo sapiens
MADVQLVESGGGLVQAGGSLRLSCAASGRPFSSLDMGWFRQRPGKERDVVATINWTGDSTYYLDSVKGRFTISRDNAKNMVFLQMNSLKPEDTAVYYCAARGGGSSVDSEYDVGEFEYDYWGQGTQVTVS

SEQ ID NO: 2124 - protein, 130 aa, Homo sapiens
MADVQLVESGGGLVQAGGSLRLSCAASGRPFSSLDMGWFRQRPGKERDVVATINWTGDSTYYLDSVKGRFTISRDNAKNAVFLQMNSLKPEDTAVYYCAARGGGSSVDSEYDVGEFEYDYWGQGTQVTVS

SEQ ID NO: 2125 - protein, 130 aa, Homo sapiens
MADVQLVESGGGLVQAGGSLRLSCAASGRPFSSLDMGWFRQRPGKERDVVATINWTGDSTYYLDSVKGRFTISRDNAENTVFLQMNSLKPEDTAVYYCAARGGGSSVDSEYDVGEFEYDYWGQGTQVTVS

SEQ ID NO: 2126 - protein, 130 aa, Homo sapiens
MADVQLVESGGGLVQAGGSLRLSCAASGRPFSSLDMGWFRQRPGKERDVVATINWTGDSTYYLDSVKGRFTISGDNAKNTVFLQMNSLKPEDTAVYYCAARGGGSSVDSEYDVGEFEYDYWGQGTQVTVS

SEQ ID NO: 2127 - protein, 130 aa, Homo sapiens
MADVQLVESGGGLVQAGGSLRLSCAASGRPFSSLDMGWFRQRPGKERDVVATINWTGDSTYYLDSVKGRFTIPRDNAKNTVFLQMNSLKPEDTAVYYCAARGGGSSVDSEYDVGEFEYDYWGQGTQVTVS

SEQ ID NO: 2128 - protein, 130 aa, Homo sapiens
MADVQLVESGGGLVQAGGSLRLSCAASGRPFSSLDMGWFRQRPGKERDVVATINWTGDSTYYLDSVKGRFTIFRDNAKNTVFLQMNSLKPEDTAVYYCAARGGGSSVDSEYDVGEFEYDYWGQGTQVTVS

SEQ ID NO: 2129 - protein, 130 aa, Homo sapiens
MADVQLVESGGGLVQAGGSLRLSCAASGRPFSSLDMGWFRQRPGKERDVVATINWTGDSTYYLDSVKGRFSISRDNAKNTVFLQMNSLKPEDTAVYYCAARGGGSSVDSEYDVGEFEYDYWGQGTQVTVS

SEQ ID NO: 2130 - protein, 130 aa, Homo sapiens
MADVQLVESGGGLVQAGGSLRLSCAASGRPFSSLDMGWFRQRPGKERDVVATINWTGDSTYYLDSVKGRFIISRDNAKNTVFLQMNSLKPEDTAVYYCAARGGGSSVDSEYDVGEFEYDYWGQGTQVTVS

SEQ ID NO: 2131 - protein, 130 aa, Homo sapiens
MADVQLVESGGGLVQAGGSLRLSCAASGRPFSSLDMGWFRQRPGKERDVVATINWTGDSTYYLDSVKGRFAISRDNAKNTVFLQMNSLKPEDTAVYYCAARGGGSSVDSEYDVGEFEYDYWGQGTQVTVS

SEQ ID NO: 2132 - protein, 130 aa, Homo sapiens
MADVQLVESGGGLVQAGGSLRLSCAASGRPFSSLDMGWFRQRPGKERDVVATINWTGDSTYYLDSVKGQFTISRDNAKNTVFLQMNSLKPEDTAVYYCAARGGGSSVDSEYDVGEFEYDYWGQGTQVTVS

SEQ ID NO: 2133 - protein, 130 aa, Homo sapiens
MADVQLVESGGGLVQAGGSLRLSCAASGRPFSSLDMGWFRQRPGKERDVVATINWTGDSTYYLDSVKGLFTISRDNAKNTVFLQMNSLKPEDTAVYYCAARGGGSSVDSEYDVGEFEYDYWGQGTQVTVS

SEQ ID NO: 2134 - protein, 130 aa, Homo sapiens
MADVQLVESGGGLVQAGGSLRLSCAASGRPFSSLDMGWFRQRPGKERDVVATINWTGDSTYYLDSVKGGFTISRDNAKNTVFLQMNSLKPEDTAVYYCAARGGGSSVDSEYDVGEFEYDYWGQGTQVTVS

SEQ ID NO: 2135 - protein, 130 aa, Homo sapiens
MADVQLVESGGGLVQAGGSLRLSCAASGRPFSSLDMGWFRQRPGKERDVVATINWTGDSTYYLDSVKDRFTISRDNAKNTVFLQMNSLKPEDTAVYYCAARGGGSSVDSEYDVGEFEYDYWGQGTQVTVS

SEQ ID NO: 2136 - protein, 130 aa, Homo sapiens
MADVQLVESGGGLVQAGGSLRLSCAASGRPFSSLDMGWFRQRPGKERDVVATINWTGDSTYYLDSVEGRFTISRDNAKNTVFLQMNSLKPEDTAVYYCAARGGGSSVDSEYDVGEFEYDYWGQGTQVTVS

SEQ ID NO: 2137 - protein, 130 aa, Homo sapiens
MADVQLVESGGGLVQAGGSLRLSCAASGRPFSSLDMGWFRQRPGKERDVVATINWTGDSTYYLDSMKGRFTISRDNAKNTVFLQMNSLKPEDTAVYYCAARGGGSSVDSEYDVGEFEYDYWGQGTQVTVS

SEQ ID NO: 2138 - protein, 130 aa, Homo sapiens
MADVQLVESGGGLVQAGGSLRLSCAASGRPFSSLDMGWFRQRPGKERDVVATINWTGDSTYYLDSLKGRFTISRDNAKNTVFLQMNSLKPEDTAVYYCAARGGGSSVDSEYDVGEFEYDYWGQGTQVTVS

SEQ ID NO: 2139 - protein, 130 aa, Homo sapiens
MADVQLVESGGGLVQAGGSLRLSCAASGRPFSSLDMGWFRQRPGKERDVVATINWTGDSTYYLDSEKGRFTISRDNAKNTVFLQMNSLKPEDTAVYYCAARGGGSSVDSEYDVGEFEYDYWGQGTQVTVS

SEQ ID NO: 2140 - protein, 130 aa, Homo sapiens
MADVQLVESGGGLVQAGGSLRLSCAASGRPFSSLDMGWFRQRPGKERDVVATINWTGDSTYYFDSVKGRFTISRDNAKNTVFLQMNSLKPEDTAVYYCAARGGGSSVDSEYDVGEFEYDYWGQGTQVTVS

SEQ ID NO: 2141 - protein, 130 aa, Homo sapiens
MADVQLVESGGGLVQAGGSLRLSCAASGRPFSSLDMGWFRQRPGKERDVVATINWTGDSTCYLDSVKGRFTISRDNAKNTVFLQMNSLKPEDTAVYYCAARGGGSSVDSEYDVGEFEYDYWGQGTQVTVS

SEQ ID NO: 2142 - protein, 130 aa, Homo sapiens
MADVQLVESGGGLVQAGGSLRLSCAASGRPFSSLDMGWFRQRPGKERDVVATINWTGDNTYYLDSVKGRFTISRDNAKNTVFLQMNSLKPEDTAVYYCAARGGGSSVDSEYDVGEFEYDYWGQGTQVTVS

SEQ ID NO: 2143 - protein, 130 aa, Homo sapiens
MADVQLVESGGGLVQAGGSLRLSCAASGRPFSSLDMGWFRQRPGKERDVVATINWTDDSTYYLDSVKGRFTISRDNAKNTVFLQMNSLKPEDTAVYYCAARGGGSSVDSEYDVGEFEYDYWGQGTQVTVS

SEQ ID NO: 2144 - protein, 130 aa, Homo sapiens
MADVQLVESGGGLVQAGGSLRLSCAASGRPFSSLDMGWFRQRPGKERDVVATINWTCDSTYYLDSVKGRFTISRDNAKNTVFLQMNSLKPEDTAVYYCAARGGGSSVDSEYDVGEFEYDYWGQGTQVTVS

SEQ ID NO: 2145 - protein, 130 aa, Homo sapiens
MADVQLVESGGGLVQAGGSLRLSCAASGRPFSSLDMGWFRQRPGKERDVVATINWSGDSTYYLDSVKGRFTISRDNAKNTVFLQMNSLKPEDTAVYYCAARGGGSSVDSEYDVGEFEYDYWGQGTQVTVS

SEQ ID NO: 2146 - protein, 130 aa, Homo sapiens
MADVQLVESGGGLVQAGGSLRLSCAASGRPFSSLDMGWFRQRPGKERDVVATINWIGDSTYYLDSVKGRFTISRDNAKNTVFLQMNSLKPEDTAVYYCAARGGGSSVDSEYDVGEFEYDYWGQGTQVTVS

SEQ ID NO: 2147 - protein, 130 aa, Homo sapiens
MADVQLVESGGGLVQAGGSLRLSCAASGRPFSSLDMGWFRQRPGKERDVVATINWAGDSTYYLDSVKGRFTISRDNAKNTVFLQMNSLKPEDTAVYYCAARGGGSSVDSEYDVGEFEYDYWGQGTQVTVS

SEQ ID NO: 2148 - protein, 130 aa, Homo sapiens
MADVQLVESGGGLVQAGGSLRLSCAASGRPFSSLDMGWFRQAPGKERETVATISWTGGSTYYADSVKGRFTISRDNAKKTVYLQMNSLKPEDTAVYYCAARGGGTSVDSDYDVGEFEYDYWGQGTQVTVS

SEQ ID NO: 2149 - protein, 130 aa, Homo sapiens
MADVQLVESGGGLVQAGGSLRLSCAASGRPFSSLDMGWFRQAPGKEREFVATISWTGGSTYYADSVKGRFTISRDNTKNTVYLQMNSLKPEDTAVYYCAARGGGTSVDSDYDVEEFEYDYWGQGTQVTVS

SEQ ID NO: 2150 - protein, 130 aa, Homo sapiens
MADVQLVESGGGLVQAGGSLRLSCAASGRPFSSLDMGWFRQAPGKEREFVATISWTGGSTYYADSVKGRFTISRDNAKNTVYLQMNSPKPEDTAVYYCAARGGGTSVDSDYDVEEFEYDYWGQGTQVTVS

SEQ ID NO: 2151 - protein, 130 aa, Homo sapiens
MADVQLVESGGGLVQAGGSLRLSCAASGRPFSSLDMGWFRQAPGKEREFVATISWTGGSTYYADSVKGRFTISRDNAKNTVYLQMNSLKPEDTVVYYCAARGGGTSVDSDYDVEEFEYDYWGQGTQVTVS

SEQ ID NO: 2152 - protein, 130 aa, Homo sapiens
MADVQLVESGGGLVQAGGSLRLSCAASGRPFSSLDMGWFRQAPGKEREFVATISWTGGSTYYADSVKGRFTISRDNAKNTVYLQMNSLKPEDTAVYYCAARGGGTSVDSDYDVGEFEYDYWGQGTQVTVS

SEQ ID NO: 2153 - protein, 130 aa, Homo sapiens
MADVQLVESGGGLVQAGGSLRLSCAASGRPFSSLDMGWFRQAPGKEREFVATISWTGGSTYYADSVKGRFTISRDNAKNTVYLQMNSLKPEDTAVYYCAARGGGTSVDSDYDVEEFQYDYWGQGTQVTVS

SEQ ID NO: 2154 - protein, 130 aa, Homo sapiens
MADVQLVESGGGLVQAGGSLRLSCAASGRPFSSLDMGWFRQAPGKEREFVATISWTGGSTYYADSVKGRFTISRDNAKNTVYLQMNSLKPEDTAVYYCAARGGGTSVDSDYDVEEFGYDYWGQGTQVTVS

SEQ ID NO: 2155 - protein, 130 aa, Homo sapiens
MADVQLVESGGGLVQAGGSLRLSCAASGRPFSSLDMGWFRQAPGKEREFVATISWTGGSTYYADSVKGRFTISRDNAKNTVYLQMNSLKPEDTAVYYCAARGGGTSVDSDYDVEEFEYNYWGQGTQVTVS

SEQ ID NO: 2156 - protein, 130 aa, Homo sapiens
MADVQLVESGGGLVQAGGSLRLSCAASGRPFSSLDMGWFRQAPGKEREFVATISWTGGSTYYADSVKGRFTISRDNAKNTVYLQMNSLKPEDTAVYYCAARGGGTSVDSDYDVEEFEYDYWGRGTQVTVS

SEQ ID NO: 2157 - protein, 130 aa, Homo sapiens
MADVQLVESGGGLVQAGGSLRLSCAASGRPFSSLDMGWFRQAPGKEREFVATISWTGGSTYYADSVKGRFTISRDNAKNTVYLQMNSLKPEDTAVYYCAARGGGTSVDSDYDVEEFEYDYWGQGTQVTVS

SEQ ID NO: 2158 - protein, 130 aa, Homo sapiens
MADVQLVESGGGLVQAGGSLRLSCAASGRPFSSLDMGWFRQAPGKEREFVATISWTGGSTYYADSVKGRFTISRDNAKNTVYLQMNSLKPEDTAVYYCAARGGGTSVDSDYDVEEFEYDYGGQGTQVTVS

SEQ ID NO: 2159 - protein, 130 aa, Homo sapiens
MADVQLVESGGGLVQAGGSLRLSCAASGRPFSSLDMGWFRQAPGKEREFVATISWTGGSTYYADSVKGRFTISRDNAKNTVYLQMNSLKPEDTAVYYCAARGGGTSVDSDYDVEEFEYDHWGQGTQVTVS

SEQ ID NO: 2160 - protein, 130 aa, Homo sapiens
MADVQLVESGGGLVQAGGSLRLSCAASGRPFSSLDMGWFRQAPGKEREFVATISWTGGSTYYADSVKGRFTISRDNAKNTVYLQMNSLKPEDTAIYYCAARGGGTSVDSDYDVEEFEYDYWGQGTQVTVS

SEQ ID NO: 2161 - protein, 130 aa, Homo sapiens
MADVQLVESGGGLVQAGGSLRLSCAASGRPFSSLDMGWFRQAPGKEREFVATISWTGGSTYYADSVKGRFTISRDNAKNTVYLQMNSLKPEDMAVYYCAARGGGTSVDSDYDVEEFEYDYWGQGTQVTVS

SEQ ID NO: 2162 - protein, 130 aa, Homo sapiens
MADVQLVESGGGLVQAGGSLRLSCAASGRPFSSLDMGWFRQAPGKEREFVATISWTGGSTYYADSVKGRFTISRDNAKNTVYLQINSLKPEDTAVYYCAARGGGTSVDSDYDVEEFEYDYWGQGTQVTVS

SEQ ID NO: 2163 - protein, 130 aa, Homo sapiens
MADVQLVESGGGLVQAGGSLRLSCAASGRPFSSLDMGWFRQAPGKEREFVATISWTGGSTYYADSVKGRFTISRDNAKNTMYLQMNSLKPEDTAVYYCAARGGGTSVDSDYDVEEFEYDYWGQGTQVTVS

SEQ ID NO: 2164 - protein, 130 aa, Homo sapiens
MADVQLVESGGGLVQAGGSLRLSCAASGRPFSSLDMGWFRQAPGKEREFVATISWTGGSTYYADSVKGRFIISRDNAKNTVYLQMNSLKPEDTAVYYCAARGGGTSVDSDYDVEEFEYDYWGQGTQVTVS

SEQ ID NO: 2165 - protein, 130 aa, Homo sapiens
MADVQLVESGGGLVQAGGSLRLSCAASGRPFSSLDMGWFRQAPGKEREFVATISWTGGSTYYADSVKGRFAISRDNAKNTVYLQMNSLKPEDTAVYYCAARGGGTSVDSDYDVEEFEYDYWGQGTQVTVS

SEQ ID NO: 2166 - protein, 130 aa, Homo sapiens
MADVQLVESGGGLVQAGGSLRLSCAASGRPFSSLDMGWFRQAPGKEREFVATISWTGGSTYYADSVKGQFTISRDNAKNTVYLQMNSLKPEDTAVYYCAARGGGTSVDSDYDVEEFEYDYWGQGTQVTVS

SEQ ID NO: 2167 - protein, 130 aa, Homo sapiens
MADVQLVESGGGLVQAGGSLRLSCAASGRPFSSLDMGWFRQAPGKEREFVATISWTGGSTYYADSVKDRFTISRDNAKNTVYLQMNSLKPEDTAVYYCAARGGGTSVDSDYDVEEFEYDYWGQGTQVTVS

SEQ ID NO: 2168 - protein, 130 aa, Homo sapiens
MADVQLVESGGGLVQAGGSLRLSCAASGRPFSSLDMGWFRQAPGKEREFVATISWTGGSTYYADSMKGRFTISRDNAKNTVYLQMNSLKPEDTAVYYCAARGGGTSVDSDYDVEEFEYDYWGQGTQVTVS

SEQ ID NO: 2169 - protein, 130 aa, Homo sapiens
MADVQLVESGGGLVQAGGSLRLSCAASGRPFSSLDMGWFRQAPGKEREFVAAITWTGGSTYYTDSVKGRFTISRDNAKNTVYLQMNSLKSEDTAVYYCAARGGGTSVDNDYDVGEFEYDYWGQGTQVTVS

SEQ ID NO: 2170 - protein, 130 aa, Homo sapiens
MADVQLVESGGGLVQAGGSLRLSCAASGRPFSSLDMGWFRQAPGKEREFVAAITWTGGSTYYTDSVKGRFTISRDNAKNTVYLQMNSLKPEDTTVYYCAARGGGTSVDNDYDVGEFEYDYWGQGTQVTVS

SEQ ID NO: 2171 - protein, 130 aa, Homo sapiens
MADVQLVESGGGLVQAGGSLRLSCAASGRPFSSLDMGWFRQAPGKEREFVAAITWTGGSTYYTDSVKGRFTISRDNAKNTVYLQMNSLKPEDTAVYYCAARGGGTSVDNDYDVGEFEYDYWGRGTQVTVS

SEQ ID NO: 2172 - protein, 130 aa, Homo sapiens
MADVQLVESGGGLVQAGGSLRLSCAASGRPFSSLDMGWFRQAPGKEREFVAAITWTGGSTYYTDSVKGRFTISRDNAKNTVYLQMNSLKPEDTAVYYCAARGGGTSVDNDYDVGEFEYDYWGQGTQVTVS

SEQ ID NO: 2173 - protein, 130 aa, Homo sapiens
MADVQLVESGGGLVQAGGSLRLSCAASGRPFSSLDMGWFRQAPGKEREFVAAITWTGGSTYYTDSVKGRFTISRDNAKNTVYLQMNSLKPEDTAVYYCAARGGGTSVDNDYDVGEFEYDYLGQGTQVTVS

SEQ ID NO: 2174 - protein, 130 aa, Homo sapiens
MADVQLVESGGGLVQAGGSLRLSCAASGRPFSSLDMGWFRQAPGKEREFVAAITWTGGSTYYTDSVKGRFTISRDNAKNLVYLQMNSLKPEDTAVYYCAARGGGTSVDNDYDVGEFEFDYWGQGTQVTVS

SEQ ID NO: 2175 - protein, 130 aa, Homo sapiens
MADVQLVESGGGLVQAGGSLRLSCAASGRPFSSLDMGWFRQAPGKERDIVATISWTGGTTYYTDSVKGRFTISRDNAKNTVYLQMNSLKPEDTAVYYCAARGGGTSVDSDYDVGEFEYDYWGQGTQVTVS

SEQ ID NO: 2176 - protein, 130 aa, Homo sapiens
MADVQLVESGGGLVQAGGSLRLSCAASGRPFSSLDMGWFRQAPGKERDIVATISWTGGSTYYADSVKGRFTISRDNAKNTVYLQMNSLKPEDTAVYYCAARGGGTSVDSDYDVGEFEYDYWGQGTQVTVS

SEQ ID NO: 2177 - protein, 130 aa, Homo sapiens
MADVQLVESGGGLVQAGGSLRLSCAASGRPFSSLDMGWFRQAPGKERDIVATISWTGGSTYYADSVKGRFTISRDNAKNTVYLQMNSLKPEDTAVYYCAARGGGTSVDSDYDVGEFDYDYWGQGTQVTVS

SEQ ID NO: 2178 - protein, 130 aa, Homo sapiens
MADVQLVESGGGLVQAGGSLRLSCAASGRPFSSLDMGWFRQAPGKERDIVATISWTGGSTYYADSVKGRFTISRDNAKNTVYLQMNSLKPEDTAVYYCAARGGGTSVDSDYDVEEFDYDYWGQGTQVTVS

SEQ ID NO: 2179 - protein, 130 aa, Homo sapiens
MADVQLVESGGGLVQAGGSLRLSCAASGRPFSSLDMGWFRQAPGKERDIVATISWTGGSTYYADSVKGRFTISRDNAKNTVYLQMNNLKPEDTAVYYCAARGGGTSVDSDYDVGEFEYDYWGQGTQVTVS

SEQ ID NO: 2180 - protein, 130 aa, Homo sapiens
MADVQLVESGGGLVQAGGSLRLSCAASGRPFSSLDMGWFRQAPGKERDIVATISWTGGSTYYADSVKGRFTIFRDNAKNTVYLQMNSLKPEDTAVYYCAARGGGTSVDSDYDVGEFEYDYWGQGTQVTVS

SEQ ID NO: 2181 - protein, 130 aa, Homo sapiens
MADVQLVESGGGLVQAGGSLRLSCAASGRPFSSLDMGWFRQAPGKERDIVATISWTGGMTYYADSVKGRFTISRDNAKNTVYLQMNSLKPEDTAVYYCAARGGGTSVDSDYDVGEFEYDYWGQGTQVTVS

SEQ ID NO: 2182 - protein, 130 aa, Homo sapiens
MADVQLVESGGGLVQAGGSLRLSCAASGRPFSSLDMGWFRQAPGKERDIVATISWTGDSTYYADSVKGRFTISRDNAKNTVYLQMNSLKPEDTAVYYCAARGGGTSVDSDYDVGEFEYDYWGQGTQVTVS

SEQ ID NO: 2183 - protein, 130 aa, Homo sapiens
MADVQLVESGGGLVQAGGSLRLSCAASGRPFSSLDMGWFRQAPGKERDIVATINWTGGSTYYADSVKGRFTISRDNAKNTVYLQMNSLKPEDTAVYYCAARGGGTSVDSDYDVGEFEYDYWGQGTQVTVS

SEQ ID NO: 2184 - protein, 130 aa, Homo sapiens
MADVQLVESGGGLVQAGGSLRLSCAASGRPFSSLDMGRFRQRPGKERDVVATINWTGDSTYYLDSVKGRFTISRDNAKNTVFLQMNSLKPEDTAVYYCAARGGGSSVDSEYDVGEFEYDYWGQGTQVTVS

SEQ ID NO: 2185 - protein, 130 aa, Homo sapiens
MADVQLVESGGGLVQAGGSLRLSCAASGRPFSSLDMDWFRQRPGKERDVVATINWTGDSTYYLDSVKGRFTISRDNAKNTVFLQMNSLKPEDTAVYYCAARGGGSSVDSEYDVGEFEYDYWGQGTQVTVS

SEQ ID NO: 2186 - protein, 130 aa, Homo sapiens
MADVQLVESGGGLVQAGGSLRLSCAASGRPFSSLDMDWFRQAPGKEREFVATISWTGGSTYYADSVKGRFTISRDNAKNTVYLQMNSLKPEDTAVYYCAARGGGTSVDSDYDVEEFEYDYWGQGTQVTVS

SEQ ID NO: 2187 - protein, 130 aa, Homo sapiens
MADVQLVESGGGLVQAGGSLRLSCAASGRPFSSLDMDWFRQAPGKEREFVAAITWTGGSTYYTDSVKGRFTISRDNAKNTVYLQMNSLKPEDTAVYYCAARGGGTSVDNDYDVGEFEYDYWGQGTQVTVS

SEQ ID NO: 2188 - protein, 130 aa, Homo sapiens
MADVQLVESGGGLVQAGGSLRLSCAASGRPFSSLDIGWFRQRPGKERDVVATINWTGDSTYYLDSVKGRFTISRDNAKNTVFLQMNSLKPEDTAVYYCAARGGGSSVDSEYDVGEFEYDYWGQGTQVTVS

SEQ ID NO: 2189 - protein, 130 aa, Homo sapiens
MADVQLVESGGGLVQAGGSLRLSCAASGRPFSSLDIGWFRQAPGKEREFVAAITWTGGSTYYTDSVKGRFTISRDNAKNTVYLQMNSLKPEDTAVYYCAARGGGTSVDNDYDVGEFEYDYWGQGTQVTVS

SEQ ID NO: 2190 - protein, 130 aa, Homo sapiens
MADVQLVESGGGLVQAGGSLRLSCAASGRPFSSLAMGWFRQAPGKEREFVATISWTGGSTYYADSVKGRFTISRDNAKNTVYLQMNSLKPEDTAVYYCAARGGGTSVDSDYDVEEFEYDYWGQGTQVTVS

SEQ ID NO: 2191 - protein, 130 aa, Homo sapiens
MADVQLVESGGGLVQAGGSLRLSCAASGRPFSSFDMGWFRQRPGKERDVVATINWTGDSTYYLDSVKGRFTISRDNAKNTVFLQMNSLKPEDTAVYYCAARGGGSSVDSEYDVGEFEYDYWGQGTQVTVS

SEQ ID NO: 2192 - protein, 130 aa, Homo sapiens
MADVQLVESGGGLVQAGGSLRLSCAASGRPFSRLDMGWFRQRPGKERDVVATINWTGDSTYYLDSVKGRFTISRDNAKNTVFLQMNSLKPEDTAVYYCAARGGGSSVDSEYDVGEFEYDYWGQGTQVTVS

SEQ ID NO: 2193 - protein, 130 aa, Homo sapiens
MADVQLVESGGGLVQAGGSLRLSCAASGRPFSGLDMGWFRQRPGKERDVVATINWTGDSTYYLDSVKGRFTISRDNAKNTVFLQMNSLKPEDTAVYYCAARGGGSSVDSEYDVGEFEYDYWGQGTQVTVS

SEQ ID NO: 2194 - protein, 130 aa, Homo sapiens
MADVQLVESGGGLVQAGGSLRLSCAASGRPFSCLDMGWFRQRPGKERDVVATINWTGDSTYYLDSVKGRFTISRDNAKNTVFLQMNSLKPEDTAVYYCAARGGGSSVDSEYDVGEFEYDYWGQGTQVTVS

SEQ ID NO: 2195 - protein, 130 aa, Homo sapiens
MADVQLVESGGGLVQAGGSLRLSCAASGRPFRSLDMGWFRQRPGKERDVVATINWTGDSTYYLDSVKGRFTISRDNAKNTVFLQMNSLKPEDTAVYYCAARGGGSSVDSEYDVGEFEYDYWGQGTQVTVS

SEQ ID NO: 2196 - protein, 130 aa, Homo sapiens
MADVQLVESGGGLVQAGGSLRLSCAASGRPFNMYDMGWFRQTLGKEREFVATVSWTGSSTNYADSVKGRFTISRDNAKNTVYLEMNSLKPEDTAVYYCAARGGGTSVDSDYDVGEFEYDYWGQGTQVTVS

SEQ ID NO: 2197 - protein, 130 aa, Homo sapiens
MADVQLVESGGGLVQAGGSLRLSCAASGRPFNMYDMGWFRQARGKEREFVATVSWTGSSTNYADSVKGRFTISRDNAKNTVYLEMNSLKPEDTAVYYCAARGGGTSVDSDYDVGEFEYDYWGQGTQVTVS

SEQ ID NO: 2198 - protein, 130 aa, Homo sapiens
MADVQLVESGGGLVQAGGSLRLSCAASGRPFNMYDMGWFRQAPGKEREFVATVSWTGSSTNYADSVKGRFTISRDNAKNTVYLEMNSLKPEDTAVYYCAARGGGTSVDSDYDVGEFEYDYWGQGTQVTVS

SEQ ID NO: 2199 - protein, 130 aa, Homo sapiens
MADVQLVESGGGLVQAGGSLRLSCAASGRPFNMYDMGWFRQALGKEREFVVTVSWTGSSTNYADSVKGRFTISRDNAKNTVYLEMNSLKPEDTAVYYCAARGGGTSVDSDYDVGEFEYDYWGQGTQVTVS

SEQ ID NO: 2200 - protein, 130 aa, Homo sapiens
MADVQLVESGGGLVQAGGSLRLSCAASGRPFNMYDMGWFRQALGKEREFVATVSWTGSSTNYVDSVKGRFTISRDNAKNTVYLEMNSLKPEDTAVYYCAARGGGTSVDSDYDVGEFEYDYWGQGTQVTVS

SEQ ID NO: 2201 - protein, 130 aa, Homo sapiens
MADVQLVESGGGLVQAGGSLRLSCAASGRPFNMYDMGWFRQALGKEREFVATVSWTGSSTNYTDSVKGRFTISRDNAKNTVYLEMNSLKPEDTAVYYCAARGGGTSVDSDYDVGEFEYDYWGQGTQVTVS

SEQ ID NO: 2202 - protein, 130 aa, Homo sapiens
MADVQLVESGGGLVQAGGSLRLSCAASGRPFNMYDMGWFRQALGKEREFVATVSWTGSSTNYADSVKGRFTISRDNTKNTVYLEMNSLKPEDTAVYYCAARGGGTSVDSDYDVGEFEYDYWGQGTQVTVS

SEQ ID NO: 2203 - protein, 130 aa, Homo sapiens
MADVQLVESGGGLVQAGGSLRLSCAASGRPFNMYDMGWFRQALGKEREFVATVSWTGSSTNYADSVKGRFTISRDNAKNTVYLEMNSPKPEDTAVYYCAARGGGTSVDSDYDVGEFEYDYWGQGTQVTVS

SEQ ID NO: 2204 - protein, 130 aa, Homo sapiens
MADVQLVESGGGLVQAGGSLRLSCAASGRPFNMYDMGWFRQALGKEREFVATVSWTGSSTNYADSVKGRFTISRDNAKNTVYLEMNSLKPEDTVVYYCAARGGGTSVDSDYDVGEFEYDYWGQGTQVTVS

SEQ ID NO: 2205 - protein, 130 aa, Homo sapiens
MADVQLVESGGGLVQAGGSLRLSCAASGRPFNMYDMGWFRQALGKEREFVATVSWTGSSTNYADSVKGRFTISRDNAKNTVYLEMNSLKPEDTAVYYCAARGGGTSVDSDYDVGEFKYDYWGQGTQVTVS

SEQ ID NO: 2206 - protein, 130 aa, Homo sapiens
MADVQLVESGGGLVQAGGSLRLSCAASGRPFNMYDMGWFRQALGKEREFVATVSWTGSSTNYADSVKGRFTISRDNAKNTVYLEMNSLKPEDTAVYYCAARGGGTSVDSDYDVGEFGYDYWGQGTQVTVS

SEQ ID NO: 2207 - protein, 130 aa, Homo sapiens
MADVQLVESGGGLVQAGGSLRLSCAASGRPFNMYDMGWFRQALGKEREFVATVSWTGSSTNYADSVKGRFTISRDNAKNTVYLEMNSLKPEDTAVYYCAARGGGTSVDSDYDVGEFEYNYWGQGTQVTVS

SEQ ID NO: 2208 - protein, 130 aa, Homo sapiens
MADVQLVESGGGLVQAGGSLRLSCAASGRPFNMYDMGWFRQALGKEREFVATVSWTGSSTNYADSVKGRFTISRDNAKNTVYLEMNSLKPEDTAVYYCAARGGGTSVDSDYDVGEFEYDYWGRGTQVTVS

SEQ ID NO: 2209 - protein, 130 aa, Homo sapiens
MADVQLVESGGGLVQAGGSLRLSCAASGRPFNMYDMGWFRQALGKEREFVATVSWTGSSTNYADSVKGRFTISRDNAKNTVYLEMNSLKPEDTAVYYCAARGGGTSVDSDYDVGEFEYDYWGQGTQVTVS

SEQ ID NO: 2210 - protein, 130 aa, Homo sapiens
MADVQLVESGGGLVQAGGSLRLSCAASGRPFNMYDMGWFRQALGKEREFVATVSWTGSSTNYADSVKGRFTISRDNAKNTVYLEMNSLKPEDTAVYYCAARGGGTSVDSDYDVGEFEYDYWDQGTQVTVS

SEQ ID NO: 2211 - protein, 130 aa, Homo sapiens
MADVQLVESGGGLVQAGGSLRLSCAASGRPFNMYDMGWFRQALGKEREFVATVSWTGSSTNYADSVKGRFTISRDNAKNTVYLEMNSLKPEDTAVYYCAARGGGTSVDSDYDVGEFEYDYRGQGTQVTVS

SEQ ID NO: 2212 - protein, 130 aa, Homo sapiens
MADVQLVESGGGLVQAGGSLRLSCAASGRPFNMYDMGWFRQALGKEREFVATVSWTGSSTNYADSVKGRFTISRDNAKNTVYLEMNSLKPEDMAVYYCAARGGGTSVDSDYDVGEFEYDYWGQGTQVTVS

SEQ ID NO: 2213 - protein, 130 aa, Homo sapiens
MADVQLVESGGGLVQAGGSLRLSCAASGRPFNMYDMGWFRQALGKEREFVATVSWTGSSTNYADSVKGRFTISRDNAKNTVYLEMNSLKPDDTAVYYCAARGGGTSVDSDYDVGEFEYDYWGQGTQVTVS

SEQ ID NO: 2214 - protein, 130 aa, Homo sapiens
MADVQLVESGGGLVQAGGSLRLSCAASGRPFNMYDMGWFRQALGKEREFVATVSWTGSSTNYADSVKGRFTISRDNAKNTVYLEMNNLKPEDTAVYYCAARGGGTSVDSDYDVGEFEYDYWGQGTQVTVS

SEQ ID NO: 2215 - protein, 130 aa, Homo sapiens
MADVQLVESGGGLVQAGGSLRLSCAASGRPFNMYDMGWFRQALGKEREFVATVSWTGSSTNYADSVKGRFTISRDNAKNTMYLEMNSLKPEDTAVYYCAARGGGTSVDSDYDVGEFEYDYWGQGTQVTVS

SEQ ID NO: 2216 - protein, 130 aa, Homo sapiens
MADVQLVESGGGLVQAGGSLRLSCAASGRPFNMYDMGWFRQALGKEREFVATVSWTGSSTNYADSVKGRFIISRDNAKNTVYLEMNSLKPEDTAVYYCAARGGGTSVDSDYDVGEFEYDYWGQGTQVTVS

SEQ ID NO: 2217 - protein, 130 aa, Homo sapiens
MADVQLVESGGGLVQAGGSLRLSCAASGRPFNMYDMGWFRQALGKEREFVATVSWTGSSTNYADSVKGQFTISRDNAKNTVYLEMNSLKPEDTAVYYCAARGGGTSVDSDYDVGEFEYDYWGQGTQVTVS

SEQ ID NO: 2218 - protein, 130 aa, Homo sapiens
MADVQLVESGGGLVQAGGSLRLSCAASGRPFNMYDMGWFRQALGKEREFVATVSWTGSSTNYADSMKGRFTISRDNAKNTVYLEMNSLKPEDTAVYYCAARGGGTSVDSDYDVGEFEYDYWGQGTQVTVS

SEQ ID NO: 2219 - protein, 130 aa, Homo sapiens
MADVQLVESGGGLVQAGGSLRLSCAASGRPFNMYDMGWFRQALGKEREFVATVSWTGSSTNYADSMKGRFTISRDNAKNTVYLEMNNLKPEDTAVYYCAARGGGTSVDSDYDVGEFEYDYWGQGTQVTVS

SEQ ID NO: 2220 - protein, 130 aa, Homo sapiens
MADVQLVESGGGLVQAGGSLRLSCAASGRPFNMYDMGWFRQALGKEREFVATVSWTGSNTNYADSVKGRFTISRDNAKNTVYLEMNSLKPEDTAVYYCAARGGGTSVDSDYDVGEFEYDYWGQGTQVTVS

SEQ ID NO: 2221 - protein, 130 aa, Homo sapiens
MADVQLVESGGGLVQAGGSLRLSCAASGRPFNMYDMGWFRQALGKECEFVATVSWTGSSTNYADSVKGRFTISRDNAKNTVYLEMNSLKPEDTAVYYCAARGGGTSVDSDYDVGEFEYDYWGQGTQVTVS

SEQ ID NO: 2222 - protein, 130 aa, Homo sapiens
MADVQLVESGGGLVQAGGSLRLSCAASGRPFNMYDMDWFRQALGKEREFVATVSWTGSSTNYADSVKGRFTISRDNAKNTVYLEMNSLKPEDTAVYYCAARGGGTSVDSDYDVGEFEYDYWGQGTQVTVS

SEQ ID NO: 2223 - protein, 130 aa, Homo sapiens
MADVQLVESGGGLVQAGGSLRLSCAASGRPFGSLDMGWFRQAPGKEREFVATISWTGGSTYYADSVKGRFTISRDNAKNTVYLQMNSLKPEDTAVYYCAARGGGTSVDSDYDVEEFEYDYWGQGTQVTVS

SEQ ID NO: 2224 - protein, 129 aa, Homo sapiens
MADVQLVESGGGLVQAGGSLRLSCAASGRAFSSYTMGWFHQAPWKEREFVAEISGTGGNTGYADSVKGRFTISRDNAKNTVYLQMNSLKPEDTAVYYCAAVIGSPTDSTDYRSSLDYDYWGQGTQVTVS

SEQ ID NO: 2225 - protein, 129 aa, Homo sapiens
MADVQLVESGGGLVQAGGSLRLSCAASGRAFSSYTMGWFHQAPGKEREFVAEISGTGGNTGYTDSVKGRFTISRDNAKNTVYLQMNSLKPEDTAVYYCAAVIGSPTDSTDYRSSLDYDYWGQGTQVTVS

SEQ ID NO: 2226 - protein, 129 aa, Homo sapiens
MADVQLVESGGGLVQAGGSLRLSCAASGRAFSSYTMGWFHQAPGKEREFVAEISGTGGNTGYADSVKGRFTISRDNAKNTVYLQMNSLKPEDTAVYYCAAVIGSPTDSTDYRSSLDYDYWGQGTQVTVS

SEQ ID NO: 2227 - protein, 129 aa, Homo sapiens
MADVQLVESGGGLVQAGGSLRLSCAASGRAFNTYTMGWFRQAPGLERDFVAEISWSGGSTGYADSVKGRFTISRDNAKNTVYLQMNSLKPQDTAVYYCAAVIGSPTDYSDYRSSLDYDYWGQGTQVTVS

SEQ ID NO: 2228 - protein, 127 aa, Homo sapiens
MADVQLVESGGGLVQAGGSLRLSCAASGRAFDRYTMAWFRQGPGKEREFVATVGWNDNSIYYADSVKGRFTISRDNAKNTVYLQMNSLKPEDTAVYYCAATFGSPVDTPLDRGAYDFWGQGTQVTVS

SEQ ID NO: 2229 - protein, 129 aa, Homo sapiens
MADVQLVESGGGLVQAGGSLRLSCAASGPSMNWYGMAWFRQSPGKERELVADVSWSGGSTYYRDSVKGRFTISRDNAKNTVYLQMNGLKPEDTAVYYCAARTSSSVDPWNYVGVGDYDYWGQGTQVTVS

SEQ ID NO: 2230 - protein, 129 aa, Homo sapiens
MADVQLVESGGGLVQAGGSLRLSCAASGPSLSWYGMAWFRQPPGKERELVADVSWSGGSTYYRDSVKGRFTISRDNAKNTVYLQMNGLKPEDTAVYYCAARTSSSVDPWNYVGVGDYDYWGQGTQVTVS

SEQ ID NO: 2231 - protein, 129 aa, Homo sapiens
MADVQLVESGGGLVQAGGSLRLSCAASGHTFSSYTMGWFHQAPGKEREFVAEISGTGGNTGYADSVKGRFTISRDNAKNTVYLQMNTLKPEDTAVYYCAAVIGSPTDSSDYRSSLDYDYWGQGTQVTVS

SEQ ID NO: 2232 - protein, 129 aa, Homo sapiens
MADVQLVESGGGLVQAGGSLRLSCAASGGTFSNYNMGWFRQAPGKEREFVAHIGWSGSSTYYADSVKGRFTISRDNAKNTMYLQMNSLKPEDTAVYYCAVAIGSPVDSYRHSDPLEYDYWGQGTQVTVS

SEQ ID NO: 2233 - protein, 130 aa, Homo sapiens
MADVQLVESGGGLVQAGGSLRLSCAASGFTLDYYGIGWFRQAPGKEREGVSCIDSSGGSTFYADSVKGRFTISRDNAKNTLYLQMNSLKPEDTAVYYCAAVLGDSVDYGMGYCNLDEYDYWGQGTQVTVS

SEQ ID NO: 2234 - protein, 123 aa, Homo sapiens
MADVQLVESGGGLVQAGGSLRLSCAASGFTFSTYAMGWVRQAPGKGPEWVATIYSKGDTTHYANSAKGRFTISRDNARNTLYLQMNSLKPEDTAVYYCAKGISDSYLRVESNYRGQGTQVTVS

SEQ ID NO: 2235 - protein, 127 aa, Homo sapiens
MADVQLVESGGGLVQAGGSLRLSCAAAGRTSSDYAMGWFRQAPGKEREFVSAINWSGISTYYADSVKGRFTISRDNAKNTVHLQMNSLKPEDTAVYYCAAEKLESLRNWHDPLRYDYWGQGTQVTVS

SEQ ID NO: 2236 - protein, 127 aa, Homo sapiens
MADVQLVESGGGLVQAGGSLRLSCAAAGRTSSDYAMGWFRQAPGKEREFVAAVNWSGVSTYYADSVKGRFTISRDNAKNTVHLQMNSLKPEDTAVYYCAAEKLESLRNWHDPLMYDYWGQGTQVTVS

SEQ ID NO: 2237 - protein, 127 aa, Homo sapiens
MADVQLVESGGGLVQAGGSLRLSCAAAGRTSSDYAMGWFRQAPGKEREFVAAINWSGISTYYADSVKGRFTISRDNAKNTVHLQMNSLKPEDTAVYYCAAEKLESLREWHDPLMYDYWGQGTQVTVS

SEQ ID NO: 2238 - protein, 127 aa, Homo sapiens
MADVQLVESGGGLVQAGGSLRLSCAAAGRTSSDYAMGWFRQAPGEERVFVAAINWSGISTYYADSVKGRFTISRDNAKNTVHLQMNSLKPEDTAVYYCAAEKLESLRNWHDPLMYDYWGQGTQVTVS

SEQ ID NO: 2239 - protein, 127 aa, Homo sapiens
MADVQLVESGGGLVQAGGSLMLSCAAARRTSNDYAMGWFRQAPGKEREFVAAINWSGISTYYADSVKGRFTISRDSAKNTVHLQMNSLKPEDTAVYYCAAEKLESLRNWHDPLMYDYWGQGTQVTVS

SEQ ID NO: 2240 - protein, 127 aa, Homo sapiens
MADVQLVESGGGLVQAGGSLMLSCAAAGRTSNDYAMGWFRQAPGKEREFVAAINWSGISTYYADSVKGRFTISRDNAKNTVHLQMNSLKPEDTAVYYCAAEKLESLRMWHDPLMYDYWGQGTQVTVS

SEQ ID NO: 2241 - protein, 130 aa, Homo sapiens
MADVQLVESGGGLVQAGGSLKLSCAASGRPFSSLDMGWFRQRPGKERDVVATINWTGDSTYYLDSVKGRFTISRDNAKNTVFLQMNSLKPEDTAVYYCAARGGGSSVDSEYDVGEFEYDYWGQGTQVTVS

SEQ ID NO: 2242 - protein, 130 aa, Homo sapiens
MADVQLVESGGGLVQAGGSLGLSCAASGRPFSSLDMGWFRQAPGKEREFVATISWTGGSTYYADSVKGRFTISRDNAKNTVYLQMNSLKPEDTAVYYCAARGGGTSVDSDYDVEEFEYDYWGQGTQVTVS

SEQ ID NO: 2243 - protein, 127 aa, Homo sapiens
MADVQLVESGGGLVQAGGPLRLSCTASGRTFSTYTMAWFRQAPGKEREFVAAISWSGAYYAESVKGRFTISRDNAKNTVYLQMNSLKPEDTAVYYCAAVIGSTVDSYSPSDPLEYDYWGQGTQVTVS

SEQ ID NO: 2244 - protein, 130 aa, Homo sapiens
MADVQLVESGGGLVQAGGALRLSCAASGRPFSSLDMGWFRQRPGKERDVVATINWTGDNTYYLDSVKGRFTISRDNAKNTVFLQMNSLKPEDTAVYYCAARGGGSSVDSEYDVGEFEYDYWGQGTQVTVS

SEQ ID NO: 2245 - protein, 133 aa, Homo sapiens
MADVQLVESGGGLVQAGDSLRLSCVASVASGRTFGWYDMGWFRQAPGKEREFVAAISWSGGSTYYADSVKGRSTISRDNAKNTVYLQMNSLKPEDTAVYYCAARGGGTSVDSDYDVGEFEYDYWGQGTQVTVS

SEQ ID NO: 2246 - protein, 127 aa, Homo sapiens
MADVQLVESGGGLVQAGDSLRLSCTASGRTFSTYTMAWFRQAPGKEREFVAAISWSGTYYADSVKGRFTISRDNAKNTVYLQMNSLKPEDTAVYYCAAVIWSTVDTYSPSDPLEYDYWGQGTQVTVS

SEQ ID NO: 2247 - protein, 127 aa, Homo sapiens
MADVQLVESGGGLVQAGDSLRLSCTASGRTFSTYTMAWFRQAPGKEREFVAAISWSGTYYADSVKGRFTISRDNAKNTVYLQMNSLKPEDTAVYYCAAVIGSTVDTYNPSDPLEYDYWGQGTQVTVS

SEQ ID NO: 2248 - protein, 127 aa, Homo sapiens
MADVQLVESGGGLVQAGDSLRLSCTASGRTFSTYTMAWFRQAPGKEREFVAAISWSGTYYADSVKGRFTISRDNAKNTVYLQMNSLKPEDTAVYYCAAVIGSTVDSYSPSDPLEYDYWGQGTQVTVS

SEQ ID NO: 2249 - protein, 129 aa, Homo sapiens
MADVQLVESGGGLVQAGDSLRLSCAASGRTFSTYTMGWFRQAPGKEREFVAHINWSGSSTYYADSVKGRFTISRDNAKNTMYLQMNSLKPEDTAVYYCAVTIGSPVDSYRHSDPLEYDYWGQGTQVTVS

SEQ ID NO: 2250 - protein, 129 aa, Homo sapiens
MADVQLVESGGGLVQAGDSLRLSCAASGRTFSTYTMGWFRQAPGKEREFVAHINWSGSSTYYADSVKGRFTISRDNAKNTMYLQMNSLKPDDTAVYYCAVTIGSPVDSYRHSDPLEYDYWGQGTQVTVS

SEQ ID NO: 2251 - protein, 130 aa, Homo sapiens
MADVQLVESGGGLVQAGDSLRLSCAASGRPFSSLDMGWFRQRPGKERDVVATINWTGDSTYYLDSVKGRFTISRDNAKNTVFLQMNSLKPEDTAVYYCAARGGGSSVDSEYDVGEFEYDYWGQGTQVTVS

SEQ ID NO: 2252 - protein, 130 aa, Homo sapiens
MADVQLVESGGGLVQAGDSLRLSCAASGRPFNMYDMGWFRQALGKEREFVATVSWTGSSTNYADSVKGRFTISRDNAKNTVYLEMNSLKPEDTAVYYCAARGGGTSVDSDYDVGEFEYDYWGQGTQVTVS

SEQ ID NO: 2253 - protein, 127 aa, Homo sapiens
MADVQLVESGGGLVQAGDSLRLSCAASGITFRWYTMAWFRQAPGKERDFVATINWSGSDTNYADSVKGRFTISRDNAKNTVTLQMNSLQPEDTAVYYCAGVPGTSLSGETDPRDYDYWGQGTQVTVS

SEQ ID NO: 2254 - protein, 129 aa, Homo sapiens
MADVQLVESGGGLVQAGASMRLSCAASGGTFSSYAMAWFRQAPGKEREFVAEDSWSNHRVWYSDSVKGRFTISRDNAKNTVYLQMNNLKPEDTAVYYCAAYRDYSGSTVDPPNQSEYDYWGQGTQVTVS

SEQ ID NO: 2255 - protein, 129 aa, Homo sapiens
MADVQLVESGGGLVQAGASLRLSCVASGGTFSSYAMAWFRQAPGKEREFVAEDSWSNHRVWYSDSVKGRFTISRDNAKNTVYLQMNNLKPEDTAVYYCAAYRDYSGSTVDPPNQSEYDYWGQGTQVTVS

SEQ ID NO: 2256 - protein, 130 aa, Homo sapiens
MADVQLVESGGGLVQAGASLRLSCAASGRPFSSLDMGWFRQRPGKERDVVATINWTGDSTYYLDSVKGRFTISRDNAKNTVFLQMNSLKPEDTAVYYCAARGGGSSVDSEYDVGEFEYDYWGQGTQVTVS

SEQ ID NO: 2257 - protein, 129 aa, Homo sapiens
MADVQLVESGGGLVQAGASLRLSCAASGGTFSSYVMAWFRQAPGKEREFVAEDSWSNHRVWYSDSVKGRFTISRDNAKNTVYLQMNNLKPEDTAVYYCAAYRDYSGSTVDPPNQSEYDYWGQGTQVTVS

SEQ ID NO: 2258 - protein, 129 aa, Homo sapiens
MADVQLVESGGGLVQAGASLRLSCAASGGTFSSYAMVWFRQAPGKEREFVAEDSWSNHRVWYSDSVKGRFTISRDNAKNTVYLQMNNLKPEDTAVYYCAAYRDYSGSTVDPPNQSEYDYWGQGTQVTVS

SEQ ID NO: 2259 - protein, 129 aa, Homo sapiens
MADVQLVESGGGLVQAGASLRLSCAASGGTFSSYAMTWFRQAPGKEREFVAEDSWSNHRVWYSDSVKGRFTISRDNAKNTVYLQMNNLKPEDTAVYYCAAYRDYSGSTVDPPNQSEYDYWGQGTQVTVS

SEQ ID NO: 2260 - protein, 129 aa, Homo sapiens
MADVQLVESGGGLVQAGASLRLSCAASGGTFSSYAMAWFRQAPGKEREFVAEDSWSNHRVWYSDSVKGRFTISRDNAKNTVYLQMNNPKPEDTAVYYCAAYRDYSGSTVDPPNQSEYDYWGQGTQVTVS

SEQ ID NO: 2261 - protein, 129 aa, Homo sapiens
MADVQLVESGGGLVQAGASLRLSCAASGGTFSSYAMAWFRQAPGKEREFVAEDSWSNHRVWYSDSVKGRFTISRDNAKNTVYLQMNNLKPKDTAVYYCAAYRDYSGSTVDPPNQSEYDYWGQGTQVTVS

SEQ ID NO: 2262 - protein, 129 aa, Homo sapiens
MADVQLVESGGGLVQAGASLRLSCAASGGTFSSYAMAWFRQAPGKEREFVAEDSWSNHRVWYSDSVKGRFTISRDNAKNTVYLQMNNLKPEDTTVYYCAAYRDYSGSTVDPPNQSEYDYWGQGTQVTVS

SEQ ID NO: 2263 - protein, 129 aa, Homo sapiens
MADVQLVESGGGLVQAGASLRLSCAASGGTFSSYAMAWFRQAPGKEREFVAEDSWSNHRVWYSDSVKGRFTISRDNAKNTVYLQMNNLKPEDTAVYYCTAYRDYSGSTVDPPNQSEYDYWGQGTQVTVS

SEQ ID NO: 2264 - protein, 129 aa, Homo sapiens
MADVQLVESGGGLVQAGASLRLSCAASGGTFSSYAMAWFRQAPGKEREFVAEDSWSNHRVWYSDSVKGRFTISRDNAKNTVYLQMNNLKPEDTAVYYCASYRDYSGSTVDPPNQSEYDYWGQGTQVTVS

SEQ ID NO: 2265 - protein, 129 aa, Homo sapiens
MADVQLVESGGGLVQAGASLRLSCAASGGTFSSYAMAWFRQAPGKEREFVAEDSWSNHRVWYSDSVKGRFTISRDNAKNTVYLQMNNLKPEDTAVYYCAAYRNYSGSTVDPPNQSEYDYWGQGTQVTVS

SEQ ID NO: 2266 - protein, 129 aa, Homo sapiens
MADVQLVESGGGLVQAGASLRLSCAASGGTFSSYAMAWFRQAPGKEREFVAEDSWSNHRVWYSDSVKGRFTISRDNAKNTVYLQMNNLKPEDTAVYYCAAYRGYSGSTVDPPNQSEYDYWGQGTQVTVS

SEQ ID NO: 2267 - protein, 129 aa, Homo sapiens
MADVQLVESGGGLVQAGASLRLSCAASGGTFSSYAMAWFRQAPGKEREFVAEDSWSNHRVWYSDSVKGRFTISRDNAKNTVYLQMNNLKPEDTAVYYCAAYRDYSGSTVDPPNQSEYGYWGQGTQVTVS

SEQ ID NO: 2268 - protein, 129 aa, Homo sapiens
MADVQLVESGGGLVQAGASLRLSCAASGGTFSSYAMAWFRQAPGKEREFVAEDSWSNHRVWYSDSVKGRFTISRDNAKNTVYLQMNNLKPEDTAVYYCAAYRDYSGSTVDPPNQSEYDDWGQGTQVTVS

SEQ ID NO: 2269 - protein, 129 aa, Homo sapiens
MADVQLVESGGGLVQAGASLRLSCAASGGTFSSYAMAWFRQAPGKEREFVAEDSWSNHRVWYSDSVKGRFTISRDNAKNTVYLQMNNLKPEDTAVYYCAAYRDYSGSTVDPPNKSEYDYWGQGTQVTVS

SEQ ID NO: 2270 - protein, 129 aa, Homo sapiens
MADVQLVESGGGLVQAGASLRLSCAASGGTFSSYAMAWFRQAPGKEREFVAEDSWSNHRVWYSDSVKGRFTISRDNAKNTVYLQMNNLKPEDTAVYYCAAYHDYSGSTVDPPNQSEYDYWGQGTQVTVS

SEQ ID NO: 2271 - protein, 129 aa, Homo sapiens
MADVQLVESGGGLVQAGASLRLSCAASGGTFSSYAMAWFRQAPGKEREFVAEDSWSNHRVWYSDSVKGRFTISRDNAKNTVYLQMNNLKPEDTAVYCCAAYRDYSGSTVDPPNQSEYDYWGQGTQVTVS

SEQ ID NO: 2272 - protein, 129 aa, Homo sapiens
MADVQLVESGGGLVQAGASLRLSCAASGGTFSSYAMAWFRQAPGKEREFVAEDSWSNHRVWYSDSVKGRFTISRDNAKNTVYLQMNNLKPEDMAVYYCAAYRDYSGSTVDPPNQSEYDYWGQGTQVTVS

SEQ ID NO: 2273 - protein, 129 aa, Homo sapiens
MADVQLVESGGGLVQAGASLRLSCAASGGTFSSYAMAWFRQAPGKEREFVAEDSWSNHRVWYSDSVKGRFTISRDNAKNTVYLQMNNLKPEDAAVYYCAAYRDYSGSTVDPPNQSEYDYWGQGTQVTVS

SEQ ID NO: 2274 - protein, 129 aa, Homo sapiens
MADVQLVESGGGLVQAGASLRLSCAASGGTFSSYAMAWFRQAPGKEREFVAEDSWSNHRVWYSDSVKGRFIISRDNAKNTVYLQMNNLKPEDTAVYYCAAYRDYSGSTVDPPNQSEYDYWGQGTQVTVS

SEQ ID NO: 2275 - protein, 129 aa, Homo sapiens
MADVQLVESGGGLVQAGASLRLSCAASGGTFSSYAMAWFRQAPGKEREFVAEDSWSNHRVWYSDSMKGRFTISRDNAKNTVYLQMNNLKPEDTAVYYCAAYRDYSGSTVDPPNQSEYDYWGQGTQVTVS

SEQ ID NO: 2276 - protein, 129 aa, Homo sapiens
MADVQLVESGGGLVQAGASLRLSCAASGGTFSSYAMAWFRQAPGKEREFVAEDSWSNHRVWYLDSVKGRFTISRDNAKNTVYLQMNNLKPEDTAVYYCAAYRDYSGSTVDPPNQSEYDYWGQGTQVTVS

SEQ ID NO: 2277 - protein, 129 aa, Homo sapiens
MADVQLVESGGGLVQAGASLRLSCAASGGTFSSYAMAWFRQAPGKEREFVAEDSWSNHRLWYSDSVKGRFTISRDNAKNTVYLQMNNLKPEDTAVYYCAAYRDYSGSTVDPPNQSEYDYWGQGTQVTVS

SEQ ID NO: 2278 - protein, 129 aa, Homo sapiens
MADVQLVESGGGLVQAGASLRLSCAASGGTFSSYAMAWFRQAPGKEREFVAEDSWSNHMVWYSDSVKGRFTISRDNAKNTVYLQMNNLKPEDTAVYYCAAYRDYSGSTVDPPNQSEYDYWGQGTQVTVS

SEQ ID NO: 2279 - protein, 129 aa, Homo sapiens
MADVQLVESGGGLVQAGASLRLSCAASGGTFSSYAMAWFHQAPGKEREFVAEDSWSNHRVWYSDSVKGRFTISRDNAKNTVYLQMNNLKPEDTAVYYCAAYRDYSGSTVDPPNQSEYDYWGQGTQVTVS

SEQ ID NO: 2280 - protein, 129 aa, Homo sapiens
MADVQLVESGGGLVQAGASLRLSCAASGGTFSSYAMARFRQAPGKEREFVAEDSWSNHRVWYSDSVKGRFTISRDNAKNTVYLQMNNLKPEDTAVYYCAAYRDYSGSTVDPPNQSEYDYWGQGTQVTVS

SEQ ID NO: 2281 - protein, 129 aa, Homo sapiens
MADVQLVESGGGLVLAGASLRLSCAASGGTFSSYAMAWFRQAPGKEREFVAEDSWSNHRVWYSDSVKGRFTISRDNAKNTVYLQMNNLKPEDTAVYYCAAYRDYSGSTVDPPNQSEYDYWGQGTQVTVS

SEQ ID NO: 2282 - protein, 125 aa, Homo sapiens
MADVQLVESGGGLVESGGSLRLSCTASGFTLDYYAIGWFRQAPGKEREGVSCISSSYSRTTYADSVKGRFTISRDKSKNMIYLQMNSLKPEDTAVYYCATRTLDGLECGGSHYDYFGQGTQVTVS

SEQ ID NO: 2283 - protein, 130 aa, Homo sapiens
MADVQLVESGGGLMQAGGSLRLSCAASGRPFSSLDMGWFRQRPGKERDVVATINWTGDSTYYLDSVKGRFTISRDNAKNTVFLQMNSLKPEDTAVYYCAARGGGSSVDSEYDVGEFEYDYWGQGTQVTVS

SEQ ID NO: 2284 - protein, 130 aa, Homo sapiens
MADVQLVESGGGLAQAGGSLRLSCAASGRPFSSLDMGWFRQRPGKERDVVATINWTGDSTYYLDSVKGRFTISRDNAKNTVFLQMNSLKPEDTAVYYCAARGGGSSVDSEYDVGEFEYDYWGQGTQVTVS

SEQ ID NO: 2285 - protein, 127 aa, Homo sapiens
MADVQLVESGGGKVQAGDSLRLSCTASGRTFSTYTMAWFRQAPGKEREFVAAISWSGAYYAESVKGRFTISRDNAKNTVYLQMNSLKPEDTAVYYCAAVIGSTVDSYSPSDPLEYDYWGQGTQVTVS

SEQ ID NO: 2286 - protein, 127 aa, Homo sapiens
MADVQLVESGGGFVQAGGSLRLSCTASGRTFSTYTMAWFRQAPGKEREFVAAISWSGAYYAESVKGRFTISRDNAKNTVYLQMNSLKPEDTAVYYCAAVIGSTVDSYSPSDPLEYDYWGQGTQVTVS

SEQ ID NO: 2287 - protein, 127 aa, Homo sapiens
MADVQLVESGGELVQAGGSLRLSCTASGRTFSTYTMAWFRQAPGKEREFVAAISWSGAYYAESVKGRFTISRDNAKNTVYLQMNSLKPEDTAVYYCAAVIGSTVDSYSPSDPLEYDYWGQGTQVTVS

SEQ ID NO: 2288 - protein, 122 aa, Homo sapiens
MADVQLVESGGELVQAGGSLRLSCEASTGTFGDYDVGWFRQAPGKDREFVGSINWSGDRRTVVNSVMGRFTIFRDNPKKTVYLQMTSLKVEDTAVYYCAARFRSSVDWQYDYWGQGTQVTVS

SEQ ID NO: 2289 - protein, 127 aa, Homo sapiens
MADVQLVESGGDLVQPGGSVRVSCVSSGFILDYYAIGWFRQAPGKEREGVSCIDSVGRAYYVDSVKGRFTISRDNAKNTVYLQMNSLKPEDTAVYYCAADFGSSVDSTCLNNQQYDYWGQGTQVTVS

SEQ ID NO: 2290 - protein, 127 aa, Homo sapiens
MADVQLVESGGDLVQPGGSLRLSCVGSDIALDYYAIGWFRQAPGKEREGIACITDSDGSTYYADSVKGRFTVSKDNAENTVYLQMNNLKPEDTAVYYCAADPRVRFYGGRCDDAYDYWGQGTQVTVS

SEQ ID NO: 2291 - protein, 129 aa, Homo sapiens
MADVQLVESGGDLVQAGASLRLSCAASGGTFSSYAMAWFRQAPGKEREFVAEDSWSNHRVWYSDSVKGRFTISRDNAKNTVYLQMNNLKPEDTAVYYCAAYRDYSGSTVDPPNQSEYDYWGQGTQVTVS

SEQ ID NO: 2292 - protein, 125 aa, Homo sapiens
MAQVQLVESGGGLVQSGGSLRLSCTASDLTLDYYAIGWFRQAPGKEREGVSCISSSYGRTTYANAVKGRFIISRDKAKNMVYLQMNSLKPEDTAVYYCATRTLDGLECGGSHYDYFGQGTQVTVS

SEQ ID NO: 2293 - protein, 125 aa, Homo sapiens
MAQVQLVESGGGLVQSGGSLRLSCTASDLTLDYYAIGWFRQAPGKEREGVSCISSSYGRTTYADSVKGRFTISRDKAKNMVYLQMNSLKPEDTAVYYCATRTLDGLECGGSHYDYFGQGTQVTVS

SEQ ID NO: 2294 - protein, 140 aa, Homo sapiens
MAQVQLVESGGGLVQPGGSLRLSCVVSGLPLDHYAIGWFRQAPGKGREGASCIHGYDDSTYYAESVKGRFTISRDTAKNTVYLQMNNLKPEDTSVYYCASTTIQVGDAYYYPMCKDYEFDDWGQGTQVTVSSGGQGTQVT

SEQ ID NO: 2295 - protein, 140 aa, Homo sapiens
MAQVQLVESGGGLVQPGGSLRLSCVVSGLPLDHYAIGWFRQAPGKGREGASCIHGYDDSTYYADSVKGRFTISRDTAKNTVYLQMNNLKPEDTSVYYCASTTIQVGDAYYYPMCKDYEFDDWGQGTQVTVSSGGQGTQVT

SEQ ID NO: 2296 - protein, 140 aa, Homo sapiens
MAQVQLVESGGGLVQPGGSLRLSCVVSGLPLDHYAIGWFRQAPGKGREGASCIHGYDDSTYYADSVKGRFTISRDTAKNTVYLQMNNLKPEDTSVYYCASTTIQVGDAYYYPMCKDYEFDDWGQGTQVTVASGGQGTQVT

SEQ ID NO: 2297 - protein, 129 aa, Homo sapiens
MAQVQLVESGGGLVQPGGSLRLSCAASGGTFSSYAMAWFRQAPGKEREFVAEDSWSNHRVWYSDSVKGRFTISRDNAKNTVYLQMNNLKPEDTAVYYCAAYRDYSGSTVDPPNQSEYDYWGQGTQVTVS

SEQ ID NO: 2298 - protein, 129 aa, Homo sapiens
MAQVQLVESGGGLVQPGGSLRLSCAASGFTLDYYAIGWFRQAPGKEREGVSCISSSDGSTYYADSVKGRFTISRDNAKNTVYLQMNNLKPEDTAVYYCAAYRDYSGSTVDPPNQSEYDYWGQGTQVTVS

SEQ ID NO: 2299 - protein, 129 aa, Homo sapiens
MAQVQLVESGGGLVQAGSSLRLSCVASGRTFSTYYMAWFRQAPGKEREFVAAINWSGGSTNYADSVKGRSTISRDNAKNTVYLQMNSLKPEDTAVYYCAAAIGSSVDSYDHSDPLEYDYWGQGTQVTVS

SEQ ID NO: 2300 - protein, 127 aa, Homo sapiens
MAQVQLVESGGGLVQAGGSLRLSCTASGWTLQYYAIGWFRQAPGKEREGVACITSSDGSTYYTDSVKGRFTISRDSDKNMIYLQMNSLKPEDTAIYYCAADPRVRYYGGRCDDEYDFWGQGTQVTVS

SEQ ID NO: 2301 - protein, 127 aa, Homo sapiens
MAQVQLVESGGGLVQAGGSLRLSCTASGWSLDYYAVGWFRQAPGKEREGVACITSSDGSTYYADSVKGRFTISKDNADNTIYLQMNSLRPEDTAVYYCAVDPRVRYYGGRCDDAYDYWGQGTQVTVS

SEQ ID NO: 2302 - protein, 127 aa, Homo sapiens
MAQVQLVESGGGLVQAGGSLRLSCTASGRTFSTYTMAWFRQAPGKEREFVAAISWSGTYYAESVKGRFTISRDNAKNTLYLQMNSLKPEDTAVYYCAAVIGSTVDTYSPSDPLEYDYWGQGTQVTVS

SEQ ID NO: 2303 - protein, 127 aa, Homo sapiens
MAQVQLVESGGGLVQAGGSLRLSCTASGRTFSTYTMAWFRQAPGKEREFVAAISWSGTYYADSVKGRFTISRDNAKNTVYLQMNSLKPEDTAVYYCAAVIGSTVDTYSPSDPLEYDYWGQGTQVTVS

SEQ ID NO: 2304 - protein, 130 aa, Homo sapiens
MAQVQLVESGGGLVQAGGSLRLSCATSGRPFSSLDMGWFRQRPGKERDVVATINWTGDSTYYLDSVKGRFTISRDNAKNTVFLQMNSLKPEDTAVYYCAARGGGSSVDSEYDVGEFEYDYWGQGTQVTVS

SEQ ID NO: 2305 - protein, 130 aa, Homo sapiens
MAQVQLVESGGGLVQAGGSLRLSCASSGRPFSSLDMGWFRQRPGKERDVVATINWTGDSTYYLDSVKGRFTISRDNAKNTVFLQMNSLKPEDTAVYYCAARGGGSSVDSEYDVGEFEYDYWGQGTQVTVS

SEQ ID NO: 2306 - protein, 129 aa, Homo sapiens
MAQVQLVESGGGLVQAGGSLRLSCAASGRTFSTYTMGWFRQAPGKEREFVAHINWSGSTTNYADSVKGRFTISRDNAKNTMYLQMNSLKPEDTAVYYCAAAIGSSVDSYDHSDPLEYDYWGQGTQVTVS

SEQ ID NO: 2307 - protein, 129 aa, Homo sapiens
MAQVQLVESGGGLVQAGGSLRLSCAASGRTFSTYTMGWFRQAPGKEREFAAHINWSGGSTNYADSVKGRFTISRDNTKNTMYLQMNSLKPEDTAVYYCAAAIGSSVDSYDHSDPLEYDYWGQGTQVTVS

SEQ ID NO: 2308 - protein, 129 aa, Homo sapiens
MAQVQLVESGGGLVQAGGSLRLSCAASGRTFSTYTMGWFRQAPGKEREFAAHINWSGGSTNYADSVKGRFTISRDNAKNTMYLQMNSPKPEDTAVYYCAAAIGSSVDSYDHSDPLEYDYWGQGTQVTVS

SEQ ID NO: 2309 - protein, 129 aa, Homo sapiens
MAQVQLVESGGGLVQAGGSLRLSCAASGRTFSTYTMGWFRQAPGKEREFAAHINWSGGSTNYADSVKGRFTISRDNAKNTMYLQMNSLKPEDTAVYYCAAAIGSSVDSYDHSDPLEYDYWGQGTQVTVS

SEQ ID NO: 2310 - protein, 129 aa, Homo sapiens
MAQVQLVESGGGLVQAGGSLRLSCAASGRTFSTYTMAWFRQAPGKEREFVAHINWSGGTTYYADSVKGRFTISRDNAKNTMYLQMNVLKPEDTAVYYCAAAIGSSVDSYDHSDPLEYDYWGQGTQVTVS

SEQ ID NO: 2311 - protein, 127 aa, Homo sapiens
MAQVQLVESGGGLVQAGGSLRLSCAASGRTFSTYTMAWFRQAPGKEREFVAAISWSGTYYADSVKGRFTISRDNAKNTVYLQMNSLKPEDTAVYYCAAVIGSTVDTYSPSDPLEYDYWGQGTQVTVS

SEQ ID NO: 2312 - protein, 129 aa, Homo sapiens
MAQVQLVESGGGLVQAGGSLRLSCAASGRTFSTYAMGWFRQAPGKEREFVAAINWSGVSTNYADSVKGRFSISRDNAKNTVYLQMNSLKPEDTAVYYCAAAIGSSVDSYDPSDSLEYDYWGQGTQVTVS

SEQ ID NO: 2313 - protein, 129 aa, Homo sapiens
MAQVQLVESGGGLVQAGGSLRLSCAASGRTFSTYAMGWFRQAPGKEREFVAAINWSGGSTNYADSVKGRFTISRDNAKNTVYLQMNSLKPEDTAVYYCAAAIGSSVDSYDHSDPLEYDYWGQGTQVTVS

SEQ ID NO: 2314 - protein, 129 aa, Homo sapiens
MAQVQLVESGGGLVQAGGSLRLSCAASGRTFSTYAMGWFRQAPGKEHEFVAAINWSGGSTNYADSVKGRFTISRDNAKNTVYLQMNSLKPEDTAVYYCAAAIGSSVDSYDHSDPLEYDYWGQGTQVTVS

SEQ ID NO: 2315 - protein, 130 aa, Homo sapiens
MAQVQLVESGGGLVQAGGSLRLSCAASGRPFSSLDMGWFRQRPGKERDVVATINWTGDSTYYLESVKGRFTISRDNAKNTVFLQMDSLKPEDTAVYYCAARGGGSSVDSEYDGGEFEYDYWGQGTQVTVS

SEQ ID NO: 2316 - protein, 130 aa, Homo sapiens
MAQVQLVESGGGLVQAGGSLRLSCAASGRPFSSLDMGWFRQRPGKERDVVATINWTGDSTYYLDSVKGRFTISRDNAKNTVFLQMNSLKPEDTAVYYCAARGGGSSVDSEYYVGEFEYDYWGQGTQVTVS

SEQ ID NO: 2317 - protein, 130 aa, Homo sapiens
MAQVQLVESGGGLVQAGGSLRLSCAASGRPFSSLDMGWFRQRPGKERDVVATINWTGDSTYYLDSVKGRFTISRDNAKNTVFLQMNSLKPEDTAVYYCAARGGGSSVDSEYNVGEFEYDYWGQGTQVTVS

SEQ ID NO: 2318 - protein, 130 aa, Homo sapiens
MAQVQLVESGGGLVQAGGSLRLSCAASGRPFSSLDMGWFRQRPGKERDVVATINWTGDSTYYLDSVKGRFTISRDNAKNTVFLQMNSLKPEDTAVYYCAARGGGSSVDSEYGVGEFEYDYWGQGTQVTVS

SEQ ID NO: 2319 - protein, 123 aa, Homo sapiens
MAQVQLVESGGGLVQAGGSLRLSCAASGRPFSSLDMGWFRQRPGKERDVVATINWTGDSTYYLDSVKGRFTISRDNAKNTVFLQMNSLKPEDTAVYYCAARGGGSSVDSEYDYWGQGTQVTVS

SEQ ID NO: 2320 - protein, 130 aa, Homo sapiens
MAQVQLVESGGGLVQAGGSLRLSCAASGRPFSSLDMGWFRQRPGKERDVVATINWTGDSTYYLDSVKGRFTISRDNAKNTVFLQMNSLKPEDTAVYYCAARGGGSSVDSEYDVREFEYDYWGQGTQVTVS

SEQ ID NO: 2321 - protein, 130 aa, Homo sapiens
MAQVQLVESGGGLVQAGGSLRLSCAASGRPFSSLDMGWFRQRPGKERDVVATINWTGDSTYYLDSVKGRFTISRDNAKNTVFLQMNSLKPEDTAVYYCAARGGGSSVDSEYDVGEYEYDYWGQGTQVTVS

SEQ ID NO: 2322 - protein, 130 aa, Homo sapiens
MAQVQLVESGGGLVQAGGSLRLSCAASGRPFSSLDMGWFRQRPGKERDVVATINWTGDSTYYLDSVKGRFTISRDNAKNTVFLQMNSLKPEDTAVYYCAARGGGSSVDSEYDVGESEYDYWGQGTQVTVS

SEQ ID NO: 2323 - protein, 130 aa, Homo sapiens
MAQVQLVESGGGLVQAGGSLRLSCAASGRPFSSLDMGWFRQRPGKERDVVATINWTGDSTYYLDSVKGRFTISRDNAKNTVFLQMNSLKPEDTAVYYCAARGGGSSVDSEYDVGELEYDYWGQGTQVTVS

SEQ ID NO: 2324 - protein, 130 aa, Homo sapiens
MAQVQLVESGGGLVQAGGSLRLSCAASGRPFSSLDMGWFRQRPGKERDVVATINWTGDSTYYLDSVKGRFTISRDNAKNTVFLQMNSLKPEDTAVYYCAARGGGSSVDSEYDVGAFEYDYWGQGTQVTVS

SEQ ID NO: 2325 - protein, 130 aa, Homo sapiens
MAQVQLVESGGGLVQAGGSLRLSCAASGRPFSSLDMGWFRQRPGKERDVVATINWTGDSTYYLDSVKGRFTISRDNAKNTVFLQMNSLKPEDTAVYYCAARGGGSSVDSEYDVEEFEYDYWGQGTQVTVS

SEQ ID NO: 2326 - protein, 130 aa, Homo sapiens
MAQVQLVESGGGLVQAGGSLRLSCAASGRPFSSLDMGWFRQRPGKERDVVATINWTGDSTYYLDSVKGRFTISRDNAKNTVFLQMNSLKPEDTAVYYCAARGGGSSVDSEYDVAEFEYDYWGQGTQVTVS

SEQ ID NO: 2327 - protein, 130 aa, Homo sapiens
MAQVQLVESGGGLVQAGGSLRLSCAASGRPFSSLDMGWFRQRPGKERDVVATINWTGDSTYYLDSVKGRFTISRDNAKNTVFLQMNSLKPEDTAVYYCAARGGGSSVDSEYDIGEFEYDYWGQGTQVTVS

SEQ ID NO: 2328 - protein, 130 aa, Homo sapiens
MAQVQLVESGGGLVQAGGSLRLSCAASGRPFSSLDMGWFRQRPGKERDVVATINWTGDSTYYLDSVKGRFTISRDNAKNTVFLQMNSLKPEDTAVYYCAARGGGSSVDSEYDGGEFEYDYWGQGTQVTVS

SEQ ID NO: 2329 - protein, 129 aa, Homo sapiens
MAQVQLVESGGGLVQAGGSLRLSCAASGGTFSSYAMAWFRQAPGKEREFVAEDSWSNHRVWYSDSVKGRFTISRDNAKNTVYLQMNNLKPEDTAVYYCAAYRDYSGSTVDPPNQSEYDYWGQGTQVTVS

SEQ ID NO: 2330 - protein, 127 aa, Homo sapiens
MAQVQLVESGGGLVQAGGSLRLSCAAAGRTSSDYAMGWFRQAPGKEREFVAAINWSGISTYYADSVKGRFTISRDNAKNTVHLQMNSLKPEDTAVYYCAAEKLESLRNWHDPLMYDYWGQGTQVTVS

SEQ ID NO: 2331 - protein, 127 aa, Homo sapiens
MAQVQLVESGGGLVQAGGSLRLSCAAAGRTSSDYAMGWFRQAPGKEREFVAAINWSGISTYYADSVKGRFTISRDNAKNTVHLQMNSLKAEDTAVYYCAAEKLESLRNWHDPLMYDYWGQGTQVTVS

SEQ ID NO: 2332 - protein, 127 aa, Homo sapiens
MAQVQLVESGGGLVQAGGSLRLSCAAAGRTSSDYAMGWFRQAPGKERDFVAAINWSGISTYYADSVKGRFTISRDNAKNTVHLQMNSLKPEDTAVYYCAAEKLESLRNWHDPLMYDYWGQGTQVTVS

SEQ ID NO: 2333 - protein, 127 aa, Homo sapiens
MAQVQLVESGGGLVQAGDSLRLSCTASGRTFSTYTMAWFRQAPGKEREFVAAISWSGTYYADSVKGRFTISRDNAKNTVYLQMNSPKPEDTAVYYCAAVIGSTVDTYSPSDPLEYDYWGQGTQVTVS

SEQ ID NO: 2334 - protein, 127 aa, Homo sapiens
MAQVQLVESGGGLVQAGDSLRLSCTASGRTFSTYTMAWFRQAPGKEREFVAAISWSGTYYADSVKGRFTISRDNAKNTVYLQMNSLKPEDTAVYYCAAVIGSTVDTYSPSDPLEYDYWGRGTQVTVS

SEQ ID NO: 2335 - protein, 127 aa, Homo sapiens
MAQVQLVESGGGLVQAGDSLRLSCTASGRTFSTYTMAWFRQAPGKEREFVAAISWSGTYYADSVKGRFTISRDNAKNTVYLQMNSLKPEDTAVYYCAAVIGSTVDTYSPSDPLEYDYWGQGTQVTVS

SEQ ID NO: 2336 - protein, 127 aa, Homo sapiens
MAQVQLVESGGGLVQAGDSLRLSCTASGRTFSTYTMAWFRQAPGKEREFVAAISWSGTYYADSVKGRFTISRDNAKNTVYLQMNSLKPEDTAVYYCAAVIGSTVDTYSPSDPLEYDDWGQGTQVTVS

SEQ ID NO: 2337 - protein, 127 aa, Homo sapiens
MAQVQLVESGGGLVQAGDSLRLSCTASGRTFSTYTMAWFRQAPGKEREFVAAISWSGTYYADSVKGRFTISRDNAKNTVFLQMNSLKPEDTAVYYCAAVIGSTVDTYSPSDPLEYDYWGQGTQVTVS

SEQ ID NO: 2338 - protein, 129 aa, Homo sapiens
MAQVQLVESGGGLVQAGDSLRLSCAASGRTFSTYTMGWFRQAPGKEREFVAHINWSGGSTNYADSVKGRFTISRDNAKNTVYLQMNSLKPEDTAVYYCAAAIGSSVDSYDHSDPLEYDYWGQGTQVTVS

SEQ ID NO: 2339 - protein, 127 aa, Homo sapiens
MAQVQLVESGGGLVQAGDSLRLSCAAAGRTSSDYAMGWFRQAPGKEREFVAAINWSGISTYYADSVKGRFTISRDNAKNTVHLQMNSLKPEDTAVYYCAAEKLESLRNWHDPLMYDYWGQGTQVTVS

SEQ ID NO: 2340 - protein, 129 aa, Homo sapiens
MAQVQLVESGGGLVQAGASLRLSCAASGGTFSSYAMAWFRQAPGKEREFVAEDSWSNHRVWYSDSVKGRFTISRDNAKNTVYLQMNNLKPEDTTVYYCAAYRDYSGSTVDPPNQSEYDYWGQGTQVTVS

SEQ ID NO: 2341 - protein, 129 aa, Homo sapiens
MAQVQLVESGGGLVQAGASLRLSCAASGGTFSSYAMAWFRQAPGKEREFVAEDSWSNHRVWYSDSVKGRFTISRDNAKNTVYLQMNNLKPEDTAVYYCADYRDYSGSTVDPPNQSEYDYWGQGTQVTVS

SEQ ID NO: 2342 - protein, 129 aa, Homo sapiens
MAQVQLVESGGGLVQAGASLRLSCAASGGTFSSYAMAWFRQAPGKEREFVAEDSWSNHRVWYSDSVKGRFTISRDNAKNTVYLQMNNLKPEDTAVYYCAAYRDYSGSTVDPPNQSEYDYWGQGTQVTVS

SEQ ID NO: 2343 - protein, 129 aa, Homo sapiens
MAQVQLVESGGGLVQAGASLRLSCAASGGTFSSYAMAWFRQAPGKEREFVAEDSWSNHRVWYSDSVKGRFTISRDNAKNTMYLQMNNLKPEDTAVYYCAAYRDYSGSTVDPPNQSEYDYWGQGTQVTVS

SEQ ID NO: 2344 - protein, 129 aa, Homo sapiens
MAQVQLVESGGGLVQAGASLRLSCAASGGTFSSYAMAWFRQAPGKEREFVAEDSWSNHRVWYSDSVKGRFAISRDNAKNTVYLQMNNLKPEDTAVYYCAAYRDYSGSTVDPPNQSEYDYWGQGTQVTVS

SEQ ID NO: 2345 - protein, 129 aa, Homo sapiens
MAQVQLVESGGGLVQAGASLRLSCAASGGTFSSYAMAWFRQAPGKEHEFVAEDSWSNHRVWYSDSVKGRFTISRDNAKNTVYLQMNNLKPEDTAVYYCAAYRDYSGSTVDPPNQSEYDYWGQGTQVTVS

SEQ ID NO: 2346 - protein, 127 aa, Homo sapiens
MAQVQLVESGGDSVRPGDSLRLSCTASGWSLDYYAVGWFRQAPGKEREGVACITSSDGSTYYADSVKGRFTISKDNADNTIYLQMNSLRPEDTAVYYCAVDPRVRYYGGRCDDAYDYWGQGTQVTVS

SEQ ID NO: 2347 - protein, 127 aa, Homo sapiens
MAQVQLVESGGDSVPSGGSLRLSCTASGWTLQYYAIGWFRQAPGKEREGVACITSSDGSTYYADSVKGRFTISRDSDKNTVYLQMNNLKPEDTGIYYCAADPRVRYYGGRCDDEYDFWGQGTQVTVS

SEQ ID NO: 2348 - protein, 127 aa, Homo sapiens
MAQVQLVESGGDQVQAGGSLRLSCTASGWTLQYYAIGWFRQAPGKEREGVACITSSDGSTYYTDSVKGRFTISRDSDKNMIYLQMNSLKPEDTAIYYCAADPRVRYYGGRCDDEYDFWGQGTQVTVS

SEQ ID NO: 2349 - protein, 127 aa, Homo sapiens
MAQVQLVESGGDQVQAGGSLRLSCTASGWTLQYYAIGWFRQAPGKEREGVACITSSDGSTYYTDSMKGRFTISRDSDKNMIYLQMNSLKPEDTAIYYCAADPRVRYYGGRCDDEYDFWGQGTQVTVS

SEQ ID NO: 2350 - protein, 127 aa, Homo sapiens
MAQVQLVESGGDQVQAGESLRLSCTASGWTLQYYAIGWFRQAPGKEREGVACITSSDGSTYYTDSVKGRFTISRDSDKNMIYLQMNSLKPEDTAIYYCAADPRVRYYGGRCDDEYDFWGQGTQVTVS

SEQ ID NO: 2351 - protein, 129 aa, Homo sapiens
MAQVQLVESGGDLVQAGASLRLSCAASGGTFSSYAMAWFRQAPGKEREFVAEDSWSNHRVWYSDSVKGRFTISRDNAKNTVYLQMNNLKPEDTAVYYCAAYRDYSGSTVDPPNQSEYDYWGQGTQVTVS

SEQ ID NO: 2352 - protein, 125 aa, Homo sapiens
MAHVQLVESGGGLVQSGGSLRLSCTASDLTLDYYAIGWFRQAPGKEREGVSCISSSYGRTTYANAVKGRFIISRDKAKNMVYLQMNSLKPEDTAVYYCATRTLDGLECGGSHYDYFGQGTQVTVS

SEQ ID NO: 2353 - protein, 125 aa, Homo sapiens
MAHVQLVESGGGLVQSGGSLRLSCTASDLTLDYYAIGWFRQAPGKEREGVSCISSSYGRTTYADSVKGRFTISRDKAKNMVYLQMNSLKPEDTAVYYCATRTLDGLECGGSHYDYFGQGTQVTVS

SEQ ID NO: 2354 - protein, 140 aa, Homo sapiens
MAHVQLVESGGGLVQPGGSLRLSCVVSGLPLDHYAIGWFRQAPGKGREGASCIHGYDDSTYYAESVKGRFTISRDTAKNTVYLQMNNLKPEDTSVYYCASTTIQVGDAYYYPMCKDYEFDDWGQGTQVTVSSGGQGTQVT

SEQ ID NO: 2355 - protein, 140 aa, Homo sapiens
MAHVQLVESGGGLVQPGGSLRLSCVVSGLPLDHYAIGWFRQAPGKGREGASCIHGYDDSTYYAESVKGRFTISRDTAKNTVYLQMNNLKPEDTSVYYCASTTIQVGDAYYYPMCKDYEFDDWGQGTQVTVASGGQGTQVT

SEQ ID NO: 2356 - protein, 140 aa, Homo sapiens
MAHVQLVESGGGLVQPGGSLRLSCVVSGLPLDHYAIGWFRQAPGKGREGASCIHGYDDSTYYADSVKGRFTISRDTAKNTVYLQMNNLKPEDTSVYYCASTTIQVGDAYYYPMCKDYEFDDWGQGTQVTVSSGGQGTQVT

SEQ ID NO: 2357 - protein, 130 aa, Homo sapiens
MAHVQLVESGGGLVQPGGSLRLSCVVSGLPLDHYAIGWFRQAPGKGREGASCIHGYDDSTYYADSVKGRFTISRDTAKNTVYLQMNNLKPEDTSVYYCASTTIQVGDAYYYPMCKDYEFDDWARGPRSPS

SEQ ID NO: 2358 - protein, 127 aa, Homo sapiens
MAHVQLVESGGGLVQPGGSLRLSCTASGWTLQYYAIGWFRQAPGKEREGVACITSSDGSTYYTDSVKGRFTISRDSDKNMIYLQMNSLKPEDTAIYYCAADPRVRYYGGRCDDEYDFWGQGTQVTVS

SEQ ID NO: 2359 - protein, 127 aa, Homo sapiens
MAHVQLVESGGGLVQPGGSLRLSCTASGRTFSTYTMAWFRQAPGKEREFVAAISWSGTYYADSVKGRFTISRDNAKNTVYLQMNSLKPEDTAVYYCAAVIGSTVDTYSPSDPLEYDYWGQGTQVTVS

SEQ ID NO: 2360 - protein, 127 aa, Homo sapiens
MAHVQLVESGGGLVQAGGSLRLSCTASGWTLQYYAIGWFRQAPGKEREGVACITSSDGSTYYTDSVKGRFTISRDSDKNMIYLQMNSLKPEDTAIYYCAADPRVRYYGGRCDDEYDFWGQGTQVTVS

SEQ ID NO: 2361 - protein, 127 aa, Homo sapiens
MAHVQLVESGGGLVQAGGSLRLSCTASGRTFSTYTMAWFRQAPGKEREFVSAISWSAVYYADAVKGRFTISRDNAKNTLYLQMNSLKPEDTAVYSCAAVIGSTVDSYSPSDPLECDYWGQGTQVTVS

SEQ ID NO: 2362 - protein, 127 aa, Homo sapiens
MAHVQLVESGGGLVQAGGSLRLSCTASGRTFSTYTMAWFRQAPGKEREFVAAISWSGTYYAESVKGRFTISRDNAKNTLYLQMNSLKPEDTAVYYCAAVIGSTVDTYSPSDPLEYDYWGQGTQVTVS

SEQ ID NO: 2363 - protein, 127 aa, Homo sapiens
MAHVQLVESGGGLVQAGGSLRLSCTASGRTFSTYTMAWFRQAPGKEREFVAAISWSGTYYADSVKGRFTISRDNAKNTVYLQMNSLKPEDTAVYYCAAVIGSTVDTYSPSDPLEYDYWGQGTQVTVS

SEQ ID NO: 2364 - protein, 129 aa, Homo sapiens
MAHVQLVESGGGLVQAGGSLRLSCAASGRTFSTYTMGWFRQAPGKEREFVAHINWSGSTTNYADSVKGRFTISRDNAKNTMYLQMNSLKPEDTAVYYCAAAIGSSVDSYDHSDPLEYDYWGQGTQVTVS

SEQ ID NO: 2365 - protein, 129 aa, Homo sapiens
MAHVQLVESGGGLVQAGGSLRLSCAASGRTFSTYTMGWFRQAPGKEREFAAHINWSGGSTNYADSVKGRFTISRDNAKNTMYLQMNSLKPEDTAVYYCAAAIGSSVDSYDHSDPLEYDYWGQGTQVTVS

SEQ ID NO: 2366 - protein, 129 aa, Homo sapiens
MAHVQLVESGGGLVQAGGSLRLSCAASGRTFSTYTMAWFRQAPGKEREFVAHINWSGGTTYYADSVKGRFTISRDNAKNTMYLQMNVLKPEDTAVYYCAAAIGSSVDSYDHSDPLEYDYWGQGTQVTVS

SEQ ID NO: 2367 - protein, 129 aa, Homo sapiens
MAHVQLVESGGGLVQAGGSLRLSCAASGRTFSTYAMGWFRQAPGKEREFVAAINWSGVSTNYADSVKGRFSISRDNAKNTVYLQMNSLKPEDTAVYYCAAAIGSSVDSYDPSDSLEYDYWGQGTQVTVS

SEQ ID NO: 2368 - protein, 129 aa, Homo sapiens
MAHVQLVESGGGLVQAGGSLRLSCAASGRTFSTYAMGWFRQAPGKEREFVAAINWSGGSTNYADSVKGRFTISRDNAKNTVYLQMNSLKPEDTAVYYCAAAIGSSVDSYDHSDPLEYDYWGQGTQVTVS

SEQ ID NO: 2369 - protein, 130 aa, Homo sapiens
MAHVQLVESGGGLVQAGGSLRLSCAASGRPFSSLDMGWFRQRPGKERDVVATINWTGDSTYYLESVKGRFTISRDNAKNTVFLQMDSLKPEDTAVYYCAARGGGSSVDSEYDGGEFEYDYWGQGTQVTVS

SEQ ID NO: 2370 - protein, 130 aa, Homo sapiens
MAHVQLVESGGGLVQAGGSLRLSCAASGRPFSSLDMGWFRQRPGKERDVVATINWTGDSTYYLDSVKGRFTISRDNAKNTVFLQMNSLKPEDTAVYYCAARGGGSSVDSEYYVGEFEYDYWGQGTQVTVS

SEQ ID NO: 2371 - protein, 130 aa, Homo sapiens
MAHVQLVESGGGLVQAGGSLRLSCAASGRPFSSLDMGWFRQRPGKERDVVATINWTGDSTYYLDSVKGRFTISRDNAKNTVFLQMNSLKPEDTAVYYCAARGGGSSVDSEYGVGEFEYDYWGQGTQVTVS

SEQ ID NO: 2372 - protein, 123 aa, Homo sapiens
MAHVQLVESGGGLVQAGGSLRLSCAASGRPFSSLDMGWFRQRPGKERDVVATINWTGDSTYYLDSVKGRFTISRDNAKNTVFLQMNSLKPEDTAVYYCAARGGGSSVDSEYDYWGQGTQVTVS

SEQ ID NO: 2373 - protein, 130 aa, Homo sapiens
MAHVQLVESGGGLVQAGGSLRLSCAASGRPFSSLDMGWFRQRPGKERDVVATINWTGDSTYYLDSVKGRFTISRDNAKNTVFLQMNSLKPEDTAVYYCAARGGGSSVDSEYDVVEFEYDYWGQGTQVTVS

SEQ ID NO: 2374 - protein, 130 aa, Homo sapiens
MAHVQLVESGGGLVQAGGSLRLSCAASGRPFSSLDMGWFRQRPGKERDVVATINWTGDSTYYLDSVKGRFTISRDNAKNTVFLQMNSLKPEDTAVYYCAARGGGSSVDSEYDVREFEYDYWGQGTQVTVS

SEQ ID NO: 2375 - protein, 130 aa, Homo sapiens
MAHVQLVESGGGLVQAGGSLRLSCAASGRPFSSLDMGWFRQRPGKERDVVATINWTGDSTYYLDSVKGRFTISRDNAKNTVFLQMNSLKPEDTAVYYCAARGGGSSVDSEYDVGKFEYDYWGQGTQVTVS

SEQ ID NO: 2376 - protein, 130 aa, Homo sapiens
MAHVQLVESGGGLVQAGGSLRLSCAASGRPFSSLDMGWFRQRPGKERDVVATINWTGDSTYYLDSVKGRFTISRDNAKNTVFLQMNSLKPEDTAVYYCAARGGGSSVDSEYDVGGFEYDYWGQGTQVTVS

SEQ ID NO: 2377 - protein, 130 aa, Homo sapiens
MAHVQLVESGGGLVQAGGSLRLSCAASGRPFSSLDMGWFRQRPGKERDVVATINWTGDSTYYLDSVKGRFTISRDNAKNTVFLQMNSLKPEDTAVYYCAARGGGSSVDSEYDVGELEYDYWGQGTQVTVS

SEQ ID NO: 2378 - protein, 130 aa, Homo sapiens
MAHVQLVESGGGLVQAGGSLRLSCAASGRPFSSLDMGWFRQRPGKERDVVATINWTGDSTYYLDSVKGRFTISRDNAKNTVFLQMNSLKPEDTAVYYCAARGGGSSVDSEYDVGECEYDYWGQGTQVTVS

SEQ ID NO: 2379 - protein, 130 aa, Homo sapiens
MAHVQLVESGGGLVQAGGSLRLSCAASGRPFSSLDMGWFRQRPGKERDVVATINWTGDSTYYLDSVKGRFTISRDNAKNTVFLQMNSLKPEDTAVYYCAARGGGSSVDSEYDVEEFEYDYWGQGTQVTVS

SEQ ID NO: 2380 - protein, 130 aa, Homo sapiens
MAHVQLVESGGGLVQAGGSLRLSCAASGRPFSSLDMGWFRQRPGKERDVVATINWTGDSTYYLDSVKGRFTISRDNAKNTVFLQMNSLKPEDTAVYYCAARGGGSSVDSEYDIGEFEYDYWGQGTQVTVS

SEQ ID NO: 2381 - protein, 130 aa, Homo sapiens
MAHVQLVESGGGLVQAGGSLRLSCAASGRPFSSLDMGWFRQRPGKERDVVATINWTGDSTYYLDSVKGRFTISRDNAKNTVFLQMNSLKPEDTAVYYCAARGGGSSVDSEYDGGEFEYDYWGQGTQVTVS

SEQ ID NO: 2382 - protein, 129 aa, Homo sapiens
MAHVQLVESGGGLVQAGGSLRLSCAASGGTFSSYAMAWFRQAPGKEREFVAEDSWSNHRVWYSDSVKGRFTISRDNAKNTVYLQMNNLKPEDTAVYYCAAYRDYSGSTVDPPNQSEYDYWGQGTQVTVS

SEQ ID NO: 2383 - protein, 127 aa, Homo sapiens
MAHVQLVESGGGLVQAGGSLRLSCAAAGRTSSDYAMGWFRQAPGKEREFVAAINWSGISTYYADSVKGRFTISRDNAKNTVHLQMNSLKPEDTAVYYCAAEKLESLRNWHDPLMYDYWGQGTQVTVS

SEQ ID NO: 2384 - protein, 127 aa, Homo sapiens
MAHVQLVESGGGLVQAGGSLRLSCAAAGRTSSDYAMGWFRQAPGKEREFVAAINWSGISTYYADSVKGRFTISRDNAKNTVHLQMNSLKAEDTAVYYCAAEKLESLRNWHDPLMYDYWGQGTQVTVS

SEQ ID NO: 2385 - protein, 127 aa, Homo sapiens
MAHVQLVESGGGLVQAGGSLRLSCAAAGRTSSDYAMGWFRQAPGKERDFVAAINWSGISTYYADSVKGRFTISRDNAKNTVHLQMNSLKPEDTAVYYCAAEKLESLRNWHDPLMYDYWGQGTQVTVS

SEQ ID NO: 2386 - protein, 127 aa, Homo sapiens
MAHVQLVESGGGLVQAGDSLRLSCTASGRTFSTYTMAWFRQAPGKEREFVAAISWTGTYYADSVKGRFTISRDNAKNTVYLQMNSLKPEDTAVYYCAAVIGSTVDTYSPSDPLEYDYWGQGTQVTVS

SEQ ID NO: 2387 - protein, 127 aa, Homo sapiens
MAHVQLVESGGGLVQAGDSLRLSCTASGRTFSTYTMAWFRQAPGKEREFVAAISWSGTYYADSVKGRFTISRDNVKNTVYLQMNSLKPEDTAVYYCAAVIGSTVDTYSPSDPLEYDYWGQGTQVTVS

SEQ ID NO: 2388 - protein, 127 aa, Homo sapiens
MAHVQLVESGGGLVQAGDSLRLSCTASGRTFSTYTMAWFRQAPGKEREFVAAISWSGTYYADSVKGRFTISRDNTKNTVYLQMNSLKPEDTAVYYCAAVIGSTVDTYSPSDPLEYDYWGQGTQVTVS

SEQ ID NO: 2389 - protein, 127 aa, Homo sapiens
MAHVQLVESGGGLVQAGDSLRLSCTASGRTFSTYTMAWFRQAPGKEREFVAAISWSGTYYADSVKGRFTISRDNAKNTVYLQMNSLKPEDTVVYYCAAVIGSTVDTYSPSDPLEYDYWGQGTQVTVS

SEQ ID NO: 2390 - protein, 127 aa, Homo sapiens
MAHVQLVESGGGLVQAGDSLRLSCTASGRTFSTYTMAWFRQAPGKEREFVAAISWSGTYYADSVKGRFTISRDNAKNTVYLQMNSLKPEDTTVYYCAAVIGSTVDTYSPSDPLEYDYWGQGTQVTVS

SEQ ID NO: 2391 - protein, 127 aa, Homo sapiens
MAHVQLVESGGGLVQAGDSLRLSCTASGRTFSTYTMAWFRQAPGKEREFVAAISWSGTYYADSVKGRFTISRDNAKNTVYLQMNSLKPEDTAVYYCAAVIGSTVDTYSPSDPLEYDYWGQGTQVTVS

SEQ ID NO: 2392 - protein, 129 aa, Homo sapiens
MAHVQLVESGGGLVQAGDSLRLSCAASGRTFSTYTMGWFRQAPGKEREFVAHINWSGGSTNYADSVKGRFTISRDNAKNTVYLQMNSLKPEDTAVYYCAAAIGSSVDSYDHSDPLEYDYWGQGTQVTVS

SEQ ID NO: 2393 - protein, 129 aa, Homo sapiens
MAHVQLVESGGGLVQAGDSLRLSCAASGGTFSSYAMAWFRQAPGKEREFVAEDSWSNHRVWYSDSVKGRFTISRDNAKNTVYLQMNNLKPEDTAVYYCAAYRDYSGSTVDPPNQSEYDYWGQGTQVTVS

SEQ ID NO: 2394 - protein, 127 aa, Homo sapiens
MAHVQLVESGGGLVQAGDSLRLSCAAAGRTSSDYAMGWFRQAPGKEREFVAAINWSGISTYYADSVKGRFTISRDNAKNTVHLQMNSLKPEDTAVYYCAAEKLESLRNWHDPLMYDYWGQGTQVTVS

SEQ ID NO: 2395 - protein, 129 aa, Homo sapiens
MAHVQLVESGGGLVQAGASLRLSCAASGGTFSSYAMAWFRQAPGKEREFVAEDSWSNHRVWYSDSVKGRFTISRDNTKNTVYLQMNNLKPEDTAVYYCAAYRDYSGSTVDPPNQSEYDYWGQGTQVTVS

SEQ ID NO: 2396 - protein, 129 aa, Homo sapiens
MAHVQLVESGGGLVQAGASLRLSCAASGGTFSSYAMAWFRQAPGKEREFVAEDSWSNHRVWYSDSVKGRFTISRDNAKNTVYLQMNNPKPEDTAVYYCAAYRDYSGSTVDPPNQSEYDYWGQGTQVTVS

SEQ ID NO: 2397 - protein, 129 aa, Homo sapiens
MAHVQLVESGGGLVQAGASLRLSCAASGGTFSSYAMAWFRQAPGKEREFVAEDSWSNHRVWYSDSVKGRFTISRDNAKNTVYLQMNNLKPEDTAVYYCAAYRDYSGSTVDPPNQSEYDYWGQGTQVTVS

SEQ ID NO: 2398 - protein, 129 aa, Homo sapiens
MAHVQLVESGGGLVQAGASLRLSCAASGGTFSSYAMAWFRQAPGKEHEFVAEDSWSNHRVWYSDSVKGRFTISRDNAKNTVYLQMNNLKPEDTAVYYCAAYRDYSGSTVDPPNQSEYDYWGQGTQVTVS

SEQ ID NO: 2399 - protein, 127 aa, Homo sapiens
MAHVQLVESGGDSVRPGDSLRLSCTASGWSLDYYAVGWFRQAPGKEREGVACITSSDGSTYYADSVKGRFTISKDNADNTIYLQMNSLRPEDTAVYYCAVDPRVRYYGGRCDDAYDYWGQGTQVTVS

SEQ ID NO: 2400 - protein, 127 aa, Homo sapiens
MAHVQLVESGGDSVQSGGSLRLSCAASDVVLDYLPVGWFRQAPGKEREGVACITSSDGSTYYADSVKGRFTISRDVAKNTVFLQMNSLKPEDTAIYYCATDPRVRYYGGRCDDAYDYWGQGTQVTVS

SEQ ID NO: 2401 - protein, 127 aa, Homo sapiens
MAHVQLVESGGDQVQAGGSLRLSCTASGWTLQYYAIGWFRQAPGKEREGVACITSSDGSTYYTDSVKGRFTISRDSDKNMIYLQMNSLKPEDTAIYYCAADPRVRYYGGRCDDEYDFWGQGTQVTVS

SEQ ID NO: 2402 - protein, 127 aa, Homo sapiens
MAHVQLVESGGDQVQAGGSLRLSCTASGWTLQYYAIGWFRQAPGKEREGVACITSSDGSTYYTDSVKGRFTISRDSDKNMIYLQMNSLKPEDTAIYYCAADPRVCYYGGRCDDEYDFWGQGTQVTVS

SEQ ID NO: 2403 - protein, 127 aa, Homo sapiens
MAHVQLVESGGDQVQAGGSLRLSCTASGWTLQYYAIGWFRQAPGKEREGVACITSSDGSTYYTDSVKGQFTISRDSDKNMIYLQMNSLKPEDTAIYYCAADPRVRYYGGRCDDEYDFWGQGTQVTVS

SEQ ID NO: 2404 - protein, 126 aa, Homo sapiens
MAEVQLVESGGGLVQTGGSLTLSCTASGISISTYALGWFRQAPGKDREFVAAYNWNGETTHYADSLKGRFTLSRDNAKNTVYLQMNTLKPEDTAVYTCVADSLSIYTMAVGRTYDYWGQGTQVTVS

SEQ ID NO: 2405 - protein, 125 aa, Homo sapiens
MAEVQLVESGGGLVQSGGSLRLSCTASDLTLDYYAIGWFRQAPGKEREGVSCISSSYGRTTYANAVKGRFIISRDKAKNMVYLQMNSLKPEDTAVYYCATRTLDGLECGGSHYDYFGQGTQVTVS

SEQ ID NO: 2406 - protein, 125 aa, Homo sapiens
MAEVQLVESGGGLVQSGGSLRLSCTASDLTLDYYAIGWFRQAPGKEREGVSCISSSYGRTTYADSVKGRFTISRDKAKNMVYLQMNSLKPEDTAVYYCATRTLDGLECGGSHYDYFGQGTQVTVS

SEQ ID NO: 2407 - protein, 129 aa, Homo sapiens
MAEVQLVESGGGLVQSGGSLRLSCAASGGTFSSYAMAWFRQAPGKEREFVAEDSWSNHRVWYSDSVKGRFTISRDNAKNTVYLQMNNLKPEDTAVYYCAAYRDYSGSTVDPPNQSEYDYWGQGTQVTVS

SEQ ID NO: 2408 - protein, 140 aa, Homo sapiens
MAEVQLVESGGGLVQPGGSLRLSCVVSGLPLDHYAIGWFRQAPGKGREGASCIHGYDDSTYYADSVKGRFTISRDTAKNTVYLQMNNLKPEDTSVYYCASTTIQVGDAYYYPMCKDYEFDDWGQGTQVTVSSGGQGTQVT

SEQ ID NO: 2409 - protein, 140 aa, Homo sapiens
MAEVQLVESGGGLVQPGGSLRLSCVVSGLPLDHYAIGWFRQAPGKGREGASCIHGYDDSTYYADSVKGRFTISRDTAKNTVYLQMNNLKPEDTSVYYCASTTIQVGDAYYYPMCKDYEFDDWGQGTQVTVASGGQGTQVT

SEQ ID NO: 2410 - protein, 140 aa, Homo sapiens
MAEVQLVESGGGLVQPGGSLRLSCVVSGLPLDHYAIGWFRQAPGKGREGASCIHGYDDSTYYADSVKGRFTISRDTAKNTVYLQMNNLKPEDTSVYYCASTTIQVGDAYYYPMCKDYEFDDWGQGTQVIVSSGGQGTQVT

SEQ ID NO: 2411 - protein, 127 aa, Homo sapiens
MAEVQLVESGGGLVQPGGSLRLSCTASGRTFSTYTMAWFRQAPGKEREFVAAISWSGTYYADSVKGRFTISRDNAKNTVYLQMNSLKPEDTAVYYCAAVIGSTVDTYSPSDPLEYDYWGQGTQVTVS

SEQ ID NO: 2412 - protein, 128 aa, Homo sapiens
MAEVQLVESGGGLVQPGGSLRLSCAASGVDSDSGIGWFRQAPGKEREGVSCIRSSDGSTYYADSVKGRFTISRDNAKNTVYLQMNNLKPEDTAVYYCAAYRDYSGSTVDPPNQSEYDYWGQGTQVTVS

SEQ ID NO: 2413 - protein, 129 aa, Homo sapiens
MAEVQLVESGGGLVQAGSSLRLSCVASGRTFSTYYMAWFRQAPGKEREFVAAINWSGGSTNYADSVKGRSTISRDNAKNTVYLQMNSLKPEDTAVYYCAAAIGSSVDSYDHSDPLEYDYWGQGTQVTVS

SEQ ID NO: 2414 - protein, 127 aa, Homo sapiens
MAEVQLVESGGGLVQAGGSLRLSCTASGWTLQYYAIGWFRQAPGKEREGVACITSSDGSTYYTDSVKGRFTISRDSDKNMIYLQMNSLKPEDTAIYYCAADPRVRYYGGRCDDEYDFWGQGTQVTVS

SEQ ID NO: 2415 - protein, 127 aa, Homo sapiens
MAEVQLVESGGGLVQAGGSLRLSCTASGRTFSTYTMAWFRQAPGKEREFVAAISWSGTYYAESVKGRFTISRDNAKNTLYLQMNSLKPEDTAVYYCAAVIGSTVDTYSPSDPLEYDYWGQGTQVTVS

SEQ ID NO: 2416 - protein, 130 aa, Homo sapiens
MAEVQLVESGGGLVQAGGSLRLSCSASGRPFSSLDMGWFRQRPGKERDVVATINWTGDSTYYLDSVKGRFTISRDNAKNTVFLQMNSLKPEDTAVYYCAARGGGSSVDSEYDVGEFEYDYWGQGTQVTVS

SEQ ID NO: 2417 - protein, 129 aa, Homo sapiens
MAEVQLVESGGGLVQAGGSLRLSCAASGRTFSTYTMGWFRQAPGKEREFVAHINWSGSTTNYADSVKGRFTISRDNAKNTMYLQMNSLKPEDTAVYYCAAAIGSSVDSYDHSDPLEYDYWGQGTQVTVS

SEQ ID NO: 2418 - protein, 129 aa, Homo sapiens
MAEVQLVESGGGLVQAGGSLRLSCAASGRTFSTYTMGWFRQAPGKEREFAAHINWSGGSTNYADSVKGRFTISRDNAKNTMYLQMNSLKPEDTAVYYCAAAIGSSVDSYDHSDPLEYDYWGQGTQVTVS

SEQ ID NO: 2419 - protein, 129 aa, Homo sapiens
MAEVQLVESGGGLVQAGGSLRLSCAASGRTFSTYTMAWFRQAPGKEREFVAHINWSGGTTYYADSVKGRFTISRDNAKNTMYLQMNVLKPEDTAVYYCAAAIGSSVDSYDHSDPLEYDYWGQGTQVTVS

SEQ ID NO: 2420 - protein, 129 aa, Homo sapiens
MAEVQLVESGGGLVQAGGSLRLSCAASGRTFSTYAMGWFRQAPGKEREFVAAINWSGVSTNYADSVKGRFSISRDNAKNTVYLQMNSLKPEDTAVYYCAAAIGSSVDSYDPSDSLEYDYWGQGTQVTVS

SEQ ID NO: 2421 - protein, 129 aa, Homo sapiens
MAEVQLVESGGGLVQAGGSLRLSCAASGRTFSTYAMGWFRQAPGKEREFVAAINWSGGSTNYADSVKGRFTISRDNAKNTVYLQMNSLKPEDTAVYYCAAAIGSSVDSYDHSDPLEYDYWGQGTQVTVS

SEQ ID NO: 2422 - protein, 130 aa, Homo sapiens
MAEVQLVESGGGLVQAGGSLRLSCAASGRPFSSLDMGWFRQRPGKERDVVATINWTGDSTYYLESVKGRFTISRDNAKNTVFLQMDSLKPEDTAVYYCAARGGGSSVDSEYDGGEFEYDYWGQGTQVTVS

SEQ ID NO: 2423 - protein, 130 aa, Homo sapiens
MAEVQLVESGGGLVQAGGSLRLSCAASGRPFSSLDMGWFRQRPGKERDVVATINWTGDSTYYLDSVKGRFTISRDNAKNTVFLQMNSLKPEDTAVYYCAARGGGSSVDSEYGVGEFEYDYWGQGTQVTVS

SEQ ID NO: 2424 - protein, 123 aa, Homo sapiens
MAEVQLVESGGGLVQAGGSLRLSCAASGRPFSSLDMGWFRQRPGKERDVVATINWTGDSTYYLDSVKGRFTISRDNAKNTVFLQMNSLKPEDTAVYYCAARGGGSSVDSEYDYWGQGTQVTVS

SEQ ID NO: 2425 - protein, 130 aa, Homo sapiens
MAEVQLVESGGGLVQAGGSLRLSCAASGRPFSSLDMGWFRQRPGKERDVVATINWTGDSTYYLDSVKGRFTISRDNAKNTVFLQMNSLKPEDTAVYYCAARGGGSSVDSEYDVVEFEYDYWGQGTQVTVS

SEQ ID NO: 2426 - protein, 130 aa, Homo sapiens
MAEVQLVESGGGLVQAGGSLRLSCAASGRPFSSLDMGWFRQRPGKERDVVATINWTGDSTYYLDSVKGRFTISRDNAKNTVFLQMNSLKPEDTAVYYCAARGGGSSVDSEYDVREFEYDYWGQGTQVTVS

SEQ ID NO: 2427 - protein, 130 aa, Homo sapiens
MAEVQLVESGGGLVQAGGSLRLSCAASGRPFSSLDMGWFRQRPGKERDVVATINWTGDSTYYLDSVKGRFTISRDNAKNTVFLQMNSLKPEDTAVYYCAARGGGSSVDSEYDVGGFEYDYWGQGTQVTVS

SEQ ID NO: 2428 - protein, 130 aa, Homo sapiens
MAEVQLVESGGGLVQAGGSLRLSCAASGRPFSSLDMGWFRQRPGKERDVVATINWTGDSTYYLDSVKGRFTISRDNAKNTVFLQMNSLKPEDTAVYYCAARGGGSSVDSEYDVGEVEYDYWGQGTQVTVS

SEQ ID NO: 2429 - protein, 130 aa, Homo sapiens
MAEVQLVESGGGLVQAGGSLRLSCAASGRPFSSLDMGWFRQRPGKERDVVATINWTGDSTYYLDSVKGRFTISRDNAKNTVFLQMNSLKPEDTAVYYCAARGGGSSVDSEYDVGELEYDYWGQGTQVTVS

SEQ ID NO: 2430 - protein, 130 aa, Homo sapiens
MAEVQLVESGGGLVQAGGSLRLSCAASGRPFSSLDMGWFRQRPGKERDVVATINWTGDSTYYLDSVKGRFTISRDNAKNTVFLQMNSLKPEDTAVYYCAARGGGSSVDSEYDVGECEYDYWGQGTQVTVS

SEQ ID NO: 2431 - protein, 130 aa, Homo sapiens
MAEVQLVESGGGLVQAGGSLRLSCAASGRPFSSLDMGWFRQRPGKERDVVATINWTGDSTYYLDSVKGRFTISRDNAKNTVFLQMNSLKPEDTAVYYCAARGGGSSVDSEYDVEEFEYDYWGQGTQVTVS

SEQ ID NO: 2432 - protein, 130 aa, Homo sapiens
MAEVQLVESGGGLVQAGGSLRLSCAASGRPFSSLDMGWFRQRPGKERDVVATINWTGDSTYYLDSVKGRFTISRDNAKNTVFLQMNSLKPEDTAVYYCAARGGGSSVDSEYDIGEFEYDYWGQGTQVTVS

SEQ ID NO: 2433 - protein, 130 aa, Homo sapiens
MAEVQLVESGGGLVQAGGSLRLSCAASGRPFSSLDMGWFRQRPGKERDVVATINWTGDSTYYLDSVKGRFTISRDNAKNTVFLQMNSLKPEDTAVYYCAARGGGSSVDSEYDGGEFEYDYWGQGTQVTVS

SEQ ID NO: 2434 - protein, 130 aa, Homo sapiens
MAEVQLVESGGGLVQAGGSLRLSCAASGRPFSSLDMGWFRQRPGKERDVVATINWTGDSTYYLDSVKGRFTISRDNAKNTVFLQMNSLKPEDTAVYYCAARGGGSSVDSEYDDGEFEYDYWGQGTQVTVS

SEQ ID NO: 2435 - protein, 130 aa, Homo sapiens
MAEVQLVESGGGLVQAGGSLRLSCAASGRPFSSLDMGWFRQRPGKERDVVATINWTGDSTYYLDSVKGRFTISRDNAKNTVFLQMNSLKPEDTAVYYCAARGGGSSVDSEYDAGEFEYDYWGQGTQVTVS

SEQ ID NO: 2436 - protein, 130 aa, Homo sapiens
MAEVQLVESGGGLVQAGGSLRLSCAASGRPFSSLDMGWFRQRPGKERDVVATINWTGDSTYYLDSVKGRFTISRDNAKNTVFLQMNSLKPEDTAVYYCAARGGGSSVDSEYAVGEFEYDYWGQGTQVTVS

SEQ ID NO: 2437 - protein, 129 aa, Homo sapiens
MAEVQLVESGGGLVQAGGSLRLSCAASGGTFSSYAMAWFRQAPGKEREFVAEDSWSNHRVWYSDSVKGRFTISRDNAKNTVYLQMNNLKPEDTAVYYCAAYRDYSGSTVDPPNQSEYDYWGQGTQVTVS

SEQ ID NO: 2438 - protein, 127 aa, Homo sapiens
MAEVQLVESGGGLVQAGGSLRLSCAAAGRTSSDYVMGWFRQAPGKEREFVAAINWSGISTYYADSVKGRFTISRDNAKNTVHLQMNSLKPEDTAVYYCAAEKLESLRNWHDPLMYDYWGQGTQVTVS

SEQ ID NO: 2439 - protein, 127 aa, Homo sapiens
MAEVQLVESGGGLVQAGGSLRLSCAAAGRTSSDYAMGWFRQAPGKEREFVAAINWSGISTYYADSVKGRFTISRDNAKNTVHLQMNSLKPEDTAVYYCAAEKLESLRNWHDPLMYDYWGQGTQVTVS

SEQ ID NO: 2440 - protein, 127 aa, Homo sapiens
MAEVQLVESGGGLVQAGGSLRLSCAAAGRTSSDYAMGWFRQAPGKEREFVAAINWSGISTYYADSVKGRFTISRDNAKNTVHLQMNSLKAEDTAVYYCAAEKLESLRNWHDPLMYDYWGQGTQVTVS

SEQ ID NO: 2441 - protein, 127 aa, Homo sapiens
MAEVQLVESGGGLVQAGGSLRLSCAAAGRTSSDYAMGWFRQAPGKERDFVAAINWSGISTYYADSVKGRFTISRDNAKNTVHLQMNSLKPEDTAVYYCAAEKLESLRNWHDPLMYDYWGQGTQVTVS

SEQ ID NO: 2442 - protein, 127 aa, Homo sapiens
MAEVQLVESGGGLVQAGDSLRLSCTASGRTFSTYTMAWFRQAPGKEREFVAAISWTGTYYADSVKGRFTISRDNAKNTVYLQMNSLKPEDTAVYYCAAVIGSTVDTYSPSDPLEYDYWGQGTQVTVS

SEQ ID NO: 2443 - protein, 127 aa, Homo sapiens
MAEVQLVESGGGLVQAGDSLRLSCTASGRTFSTYTMAWFRQAPGKEREFVAAISWSGTYYADSVKGRFTISRDNAKNTVYLQMNSPKPEDTAVYYCAAVIGSTVDTYSPSDPLEYDYWGQGTQVTVS

SEQ ID NO: 2444 - protein, 127 aa, Homo sapiens
MAEVQLVESGGGLVQAGDSLRLSCTASGRTFSTYTMAWFRQAPGKEREFVAAISWSGTYYADSVKGRFTISRDNAKNTVYLQMNSLKPEDTAVYYCAAVIGSTVDTYSPSDPLEYDYWGQGTQVTVS

SEQ ID NO: 2445 - protein, 127 aa, Homo sapiens
MAEVQLVESGGGLVQAGDSLRLSCTASGRTFSTYTMAWFRQAPGKEREFVAAISWSGTYYADSVKGRFTISRDNAKNTVYLQMNSLKPEDMAVYYCAAVIGSTVDTYSPSDPLEYDYWGQGTQVTVS

SEQ ID NO: 2446 - protein, 127 aa, Homo sapiens
MAEVQLVESGGGLVQAGDSLRLSCTASGRTFSTYTMAWFRQAPGKEREFVAAISWSGTYYADSVKGRFIISRDNAKNTVYLQMNSLKPEDTAVYYCAAVIGSTVDTYSPSDPLEYDYWGQGTQVTVS

SEQ ID NO: 2447 - protein, 127 aa, Homo sapiens
MAEVQLVESGGGLVQAGDSLRLSCTASGRTFSTYTMAWFRQAPGKEREFVAAISWSGTYYADSVKGRFAISRDNAKNTVYLQMNSLKPEDTAVYYCAAVIGSTVDTYSPSDPLEYDYWGQGTQVTVS

SEQ ID NO: 2448 - protein, 127 aa, Homo sapiens
MAEVQLVESGGGLVQAGDSLRLSCTASGRTFSTYTMAWFRQAPGKEREFVAAISWSGTYYADSVKGQFTISRDNAKNTVYLQMNSLKPEDTAVYYCAAVIGSTVDTYSPSDPLEYDYWGQGTQVTVS

SEQ ID NO: 2449 - protein, 127 aa, Homo sapiens
MAEVQLVESGGGLVQAGDSLRLSCTASGRTFSTYTMAWFRQAPGKEREFVAAISWSGTYYADSMKGRFTISRDNAKNTVYLQMNSLKPEDTAVYYCAAVIGSTVDTYSPSDPLEYDYWGQGTQVTVS

SEQ ID NO: 2450 - protein, 127 aa, Homo sapiens
MAEVQLVESGGGLVQAGDSLRLSCTASGRTFSTYTMAWFRQAPGKEHEFVAAISWSGTYYADSVKGRFTISRDNAKNTVYLQMNSLKPEDTAVYYCAAVIGSTVDTYSPSDPLEYDYWGQGTQVTVS

SEQ ID NO: 2451 - protein, 127 aa, Homo sapiens
MAEVQLVESGGGLVQAGDSLRLSCTASGRTFSTYTMAWFRQAPGEEREFVAAISWSGTYYADSVKGRFTISRDNAKNTVYLQMNSLKPEDTAVYYCAAVIGSTVDTYSPSDPLEYDYWGQGTQVTVS

SEQ ID NO: 2452 - protein, 127 aa, Homo sapiens
MAEVQLVESGGGLVQAGDSLRLSCTASGRTFSTYTMAWFHQAPGKEREFVAAISWSGTYYADSVKGRFTISRDNAKNTVYLQMNSLKPEDTAVYYCAAVIGSTVDTYSPSDPLEYDYWGQGTQVTVS

SEQ ID NO: 2453 - protein, 129 aa, Homo sapiens
MAEVQLVESGGGLVQAGDSLRLSCAASGRTFSTYTMGWFRQAPGKEREFVAHINWSGGSTNYADSVKGRFTISRDNAKNTVYLQMNSLKPEDTAVYYCAAAIGSSVDSYDHSDPLEYDYWGQGTQVTVS

SEQ ID NO: 2454 - protein, 129 aa, Homo sapiens
MAEVQLVESGGGLVQAGDSLRLSCAASGGTFSSYAMAWFRQAPGKEREFVAEDSWSNHRVWYSDSVKGRFTISRDNAKNTVYLQMNNLKPEDTAVYYCAAYRDYSGSTVDPPNQSEYDYWGQGTQVTVS

SEQ ID NO: 2455 - protein, 127 aa, Homo sapiens
MAEVQLVESGGGLVQAGDSLRLSCAAAGRTSSDYAMGWFRQAPGKEREFVAAINWSGISTYYADSVKGRFTISRDNAKNTVHLQMNSLKPEDTAVYYCAAEKLESLRNWHDPLMYDYWGQGTQVTVS

SEQ ID NO: 2456 - protein, 129 aa, Homo sapiens
MAEVQLVESGGGLVQAGASLRLSCAASGGTFSSYAMAWFRQTPGKEREFVAEDSWSNHRVWYSDSVKGRFTISRDNAKNTVYLQMNNLKPEDTAVYYCAAYRDYSGSTVDPPNQSEYDYWGQGTQVTVS

SEQ ID NO: 2457 - protein, 129 aa, Homo sapiens
MAEVQLVESGGGLVQAGASLRLSCAASGGTFSSYAMAWFRQAPGKGREFVAEDSWSNHRVWYSDSVKGRFTISRDNAKNTVYLQMNNLKPEDTAVYYCAAYRDYSGSTVDPPNQSEYDYWGQGTQVTVS

SEQ ID NO: 2458 - protein, 129 aa, Homo sapiens
MAEVQLVESGGGLVQAGASLRLSCAASGGTFSSYAMAWFRQAPGKEREFVAEDSWSNHRVWYSDSVKGRFTISRDNAKNTVYLQMNNLKPEDTAVYYCVAYRDYSGSTVDPPNQSEYDYWGQGTQVTVS

SEQ ID NO: 2459 - protein, 129 aa, Homo sapiens
MAEVQLVESGGGLVQAGASLRLSCAASGGTFSSYAMAWFRQAPGKEREFVAEDSWSNHRVWYSDSVKGRFTISRDNAKNTVYLQMNNLKPEDTAVYYCATYRDYSGSTVDPPNQSEYDYWGQGTQVTVS

SEQ ID NO: 2460 - protein, 129 aa, Homo sapiens
MAEVQLVESGGGLVQAGASLRLSCAASGGTFSSYAMAWFRQAPGKEREFVAEDSWSNHRVWYSDSVKGRFTISRDNAKNTVYLQMNNLKPEDTAVYYCAAYRDYSGSTVDPPNQSEYDYWGQGTQVTVS

SEQ ID NO: 2461 - protein, 129 aa, Homo sapiens
MAEVQLVESGGGLVQAGASLRLSCAASGGTFSSYAMAWFRQAPGKEREFVAEDSWSNHRVWYSDSVKGRFTISRDNAKNTVYLQMNNLKPEDTAVYYCAAHRDYSGSTVDPPNQSEYDYWGQGTQVTVS

SEQ ID NO: 2462 - protein, 129 aa, Homo sapiens
MAEVQLVESGGGLVQAGASLRLSCAASGGTFSSYAMAWFRQAPGKEREFVAEDSWSNHRVWYSDSVKGRFTISRDNAKNTVYLQMNNLKPEDMAVYYCAAYRDYSGSTVDPPNQSEYDYWGQGTQVTVS

SEQ ID NO: 2463 - protein, 129 aa, Homo sapiens
MAEVQLVESGGGLVQAGASLRLSCAASGGTFSSYAMAWFRQAPGKEREFVAEDSWSNHRVWYSDSVKGRFIISRDNAKNTVYLQMNNLKPEDTAVYYCAAYRDYSGSTVDPPNQSEYDYWGQGTQVTVS

SEQ ID NO: 2464 - protein, 129 aa, Homo sapiens
MAEVQLVESGGGLVQAGASLRLSCAASGGTFSSYAMAWFRQAPGKEREFVAEDSWSNHRVWYSDSVKGQFTISRDNAKNTVYLQMNNLKPEDTAVYYCAAYRDYSGSTVDPPNQSEYDYWGQGTQVTVS

SEQ ID NO: 2465 - protein, 129 aa, Homo sapiens
MAEVQLVESGGGLVQAGASLRLSCAASGGTFSSYAMAWFRQAPGKEREFVAEDSWSNHRVWYSDSMKGRFTISRDNAKNTVYLQMNNLKPEDTAVYYCAAYRDYSGSTVDPPNQSEYDYWGQGTQVTVS

SEQ ID NO: 2466 - protein, 129 aa, Homo sapiens
MAEVQLVESGGGLVQAGASLRLSCAASGGTFSSYAMAWFRQAPGKEREFVAEDSWSNHRVWYLDSVKGRFTISRDNAKNTVYLQMNNLKPEDTAVYYCAAYRDYSGSTVDPPNQSEYDYWGQGTQVTVS

SEQ ID NO: 2467 - protein, 129 aa, Homo sapiens
MAEVQLVESGGGLVQAGASLRLSCAASGGTFSSYAMAWFRQAPGKEHEFVAEDSWSNHRVWYSDSVKGRFTISRDNAKNTVYLQMNNLKPEDTAVYYCAAYRDYSGSTVDPPNQSEYDYWGQGTQVTVS

SEQ ID NO: 2468 - protein, 129 aa, Homo sapiens
MAEVQLVESGGGLVQAGASLRLSCAASGGTFSSYAMAWFRQALGKEREFVAEDSWSNHRVWYSDSVKGRFTISRDNAKNTVYLQMNNLKPEDTAVYYCAAYRDYSGSTVDPPNQSEYDYWGQGTQVTVS

SEQ ID NO: 2469 - protein, 129 aa, Homo sapiens
MAEVQLVESGGELVQPGGSLRLTCTADGYSLNYLTVAWYRQAPGKEREGVSCIASTDGHTYYADSVKGRFTISRDNAENAVYLQMNNLTPEDTAVYYCAARSFMVSGYSCNSSPHDYDYWGQGTQVTVS

SEQ ID NO: 2470 - protein, 127 aa, Homo sapiens
MAEVQLVESGGDSVRPGDSLRLSCTASGWSLDYYAVGWFRQAPGKEREGVACITSSDGSTYYADSVKGRFTISKDNADNTIYLQMNSLRPEDTAVYYCAVDPRVRYYGGRCDDAYDYWGQGTQVTVS

SEQ ID NO: 2471 - protein, 127 aa, Homo sapiens
MAEVQLVESGGDSVQSGGSLRLSCAASDVVLDYLPVGWFRQAPGKEREGVACITSSDGSTYYADSVKGRFTISRDVAKNTVFLQMNSLKPEDTAIYYCATDPRVRYYGGRCDDAYDYWGQGTQVTVS

SEQ ID NO: 2472 - protein, 127 aa, Homo sapiens
MAEVQLVESGGDSVPSGGSLRLSCTASGWTLQYYAIGWFRQAPGKEREGVACITSSDGSTYYADSVKGRFTISRDSDKNTVYLQMNNLKPEDTGIYYCAADPRVRYYGGRCDDEYDFWGQGTQVTVS

SEQ ID NO: 2473 - protein, 127 aa, Homo sapiens
MAEVQLVESGGDQVQAGGSLRLSCTASGWTLQYYAIGWFRQAPGKEREGVACITSSDGSTYYTDSVKGRFTISRDSDKNMIYLQMNSLKPEDTAIYYCAADPRVRYYGGRCDDEYDFWGQGTQVTVS

SEQ ID NO: 2474 - protein, 127 aa, Homo sapiens
MAEVQLVESGGDQVQAGGSLRLSCTASGWTLQYYAIGWFRQAPGKEREGVACITSSDGSTYYTDSVKGRFTISRDSDKNMIYLQMNSLKPEDTAIYYCAADPRVCYYGGRCDDEYDFWGQGTQVTVS

SEQ ID NO: 2475 - protein, 127 aa, Homo sapiens
MAEVQLVESGGDLVQPGGSLRLSCAGSDIVLDYLPIGWFRQAPGKEREGVACITSSDGSTYYADSVKGRFTISRDNAENTVYLQMNNLKPEDTAIYYCATDPRVRYYGGRCDDAYDYWGQGTQVTVS

SEQ ID NO: 2476 - protein, 125 aa, Homo sapiens
MADVQLVESGGGLVQSGGSLRLSCTASDLTLDYYAIGWFRQAPGKEREGVSCISSSYGRTTYANAVKGRFIISRDKAKNMVYLQMNSLKPEDTAVYYCATRTLDGLECGGSHYDYFGQGTQVTVS

SEQ ID NO: 2477 - protein, 125 aa, Homo sapiens
MADVQLVESGGGLVQSGGSLRLSCTASDLTLDYYAIGWFRQAPGKEREGVSCISSSYGRTTYADSVKGRFTISRDKAKNMVYLQMNSLKPEDTAVYYCATRTLDGLECGGSHYDYFGQGTQVTVS

SEQ ID NO: 2478 - protein, 127 aa, Homo sapiens
MADVQLVESGGGLVQSGGSLRLSCAASDVVLDYLPVGWFRQAPGKEREGVACITSSDGSTYYADSVKGRFTISRDVAKNTVFLQMNSLKPEDTAIYYCATDPRVRYYGGRCDDAYDYWGQGTQVTVS

SEQ ID NO: 2479 - protein, 140 aa, Homo sapiens
MADVQLVESGGGLVQPGGSLRLSCVVSGLPLDHYAIGWFRQAPGKGREGASCIHGYDDSTYYAESVKGRFTISRDTAKNTVYLQMNNLKPEDTSVYYCASTTIQVGDAYYYPMCKDYEFDDWGQGTQVTVSSGGQGTQVT

SEQ ID NO: 2480 - protein, 130 aa, Homo sapiens
MADVQLVESGGGLVQPGGSLRLSCVVSGLPLDHYAIGWFRQAPGKGREGASCIHGYDDSTYYAESVKGRFTISRDTAKNTVYLQMNNLKPEDTSVYYCASTTIQVGDAYYYPMCKDYEFDDWGQGPRSPS

SEQ ID NO: 2481 - protein, 140 aa, Homo sapiens
MADVQLVESGGGLVQPGGSLRLSCVVSGLPLDHYAIGWFRQAPGKGREGASCIHGYDDSTYYADSVKGRFTISRDTAKNTVYLQMNNLKPEDTSVYYCASTTIQVGDAYYYPMCKDYEFDDWGQGTQVTVSSGGQGTQVT

SEQ ID NO: 2482 - protein, 140 aa, Homo sapiens
MADVQLVESGGGLVQPGGSLRLSCVVSGLPLDHYAIGWFRQAPGKGREGASCIHGYDDSTYYADSVKGRFTISRDTAKNTVYLQMNNLKPEDTSVYYCASTTIQVGDAYYYPMCKDYEFDDWGQGTQVTVASGGQGTQVT

SEQ ID NO: 2483 - protein, 129 aa, Homo sapiens
MADVQLVESGGGLVQPGGSLRLACAASGRTFSRYAVGWFRQAPGKEREFVAEDSWSNHRVWYSDSVKGRFTISRDNAKNTVYLQMNNLKPEDTAVYYCAAYRDYSGSTVDPPNQSEYDYWGQGTQVTVS

SEQ ID NO: 2484 - protein, 129 aa, Homo sapiens
MADVQLVESGGGLVQAGSSLRLSCVASGRTFSTYYMAWFRQAPGKEREFVAAINWSGGSTNYADSVKGRSTISRDNAKNTVYLQMNSLKPEDTAVYYCAAAIGSSVDSYDHSDPLEYDYWGQGTQVTVS

SEQ ID NO: 2485 - protein, 127 aa, Homo sapiens
MADVQLVESGGGLVQAGGSLRLSCTASGRTFSTYTMAWFRQAPGKEREFVAAISWSGTYYAESVKGRFTISRDNAKNTLYLQMNSLKPEDTAVYYCAAVIGSTVDTYSPSDPLEYDYWGQGTQVTVS

SEQ ID NO: 2486 - protein, 129 aa, Homo sapiens
MADVQLVESGGGLVQAGGSLRLSCAASRTLFSINAMAWYRQTPGKQRELVARVTSGGSTNYADSVKGRFTISRDNAKNTVYLQMNSLKPEDTAVYYCAARGGGTSVDSDYDVEEFEYDYWGQGTQVTVS

SEQ ID NO: 2487 - protein, 129 aa, Homo sapiens
MADVQLVESGGGLVQAGGSLRLSCAASGRTFSTYTMGWFRQAPGKEREFVAHINWSGSTTNYADSVKGRFTISRDNAKNTMYLQMNSLKPEDTAVYYCAAAIGSSVDSYDHSDPLEYDYWGQGTQVTVS

SEQ ID NO: 2488 - protein, 129 aa, Homo sapiens
MADVQLVESGGGLVQAGGSLRLSCAASGRTFSTYTMGWFRQAPGKEREFAAHINWSGGSTNYADSVKGRFTISRDNAKNTMYLQMNSLKPEDTAVYYCAAAIGSSVDSYDHSDPLEYDYWGQGTQVTVS

SEQ ID NO: 2489 - protein, 129 aa, Homo sapiens
MADVQLVESGGGLVQAGGSLRLSCAASGRTFSTYTMAWFRQAPGKEREFVAHINWSGGTTYYADSVKGRFTISRDNAKNTMYLQMNVLKPEDTAVYYCAAAIGSSVDSYDHSDPLEYDYWGQGTQVTVS

SEQ ID NO: 2490 - protein, 127 aa, Homo sapiens
MADVQLVESGGGLVQAGGSLRLSCAASGRTFSTYTMAWFRQAPGKEREFVAAISWSGTYYADSVKGRFTISRDNAKNTVYLQMNSLKPEDTAVYYCAAVIGSTVDTYSPSDPLEYDYWGQGTQVTVS

SEQ ID NO: 2491 - protein, 129 aa, Homo sapiens
MADVQLVESGGGLVQAGGSLRLSCAASGRTFSTYAMGWFRQAPGKEREFVAAINWSGVSTNYADSVKGRFSISRDNAKNTVYLQMNSLKPEDTAVYYCAAAIGSSVDSYDPSDSLEYDYWGQGTQVTVS

SEQ ID NO: 2492 - protein, 129 aa, Homo sapiens
MADVQLVESGGGLVQAGGSLRLSCAASGRTFSTYAMGWFRQAPGKEREFVAAINWSGGSTNYADSVKGRFTISRDNAKNTVYLQMNSLKPEDTAVYYCAAAIGSSVDSYDHSDPLEYDYWGQGTQVTVS

SEQ ID NO: 2493 - protein, 130 aa, Homo sapiens
MADVQLVESGGGLVQAGGSLRLSCAASGRPFSSLDMGWFRQRPGKERDVVATINWTGDSTYYLESVKGRFTISRDNAKNTVFLQMDSLKPEDTAVYYCAARGGGSSVDSEYDGGEFEYDYWGQGTQVTVS

SEQ ID NO: 2494 - protein, 130 aa, Homo sapiens
MADVQLVESGGGLVQAGGSLRLSCAASGRPFSSLDMGWFRQRPGKERDVVATINWTGDSTYYLDSVKGRFTISRDNAKNTVFLQMNSLKPEDTAVYYCAARGGGSSVDSEYYVGEFEYDYWGQGTQVTVS

SEQ ID NO: 2495 - protein, 130 aa, Homo sapiens
MADVQLVESGGGLVQAGGSLRLSCAASGRPFSSLDMGWFRQRPGKERDVVATINWTGDSTYYLDSVKGRFTISRDNAKNTVFLQMNSLKPEDTAVYYCAARGGGSSVDSEYNVGEFEYDYWGQGTQVTVS

SEQ ID NO: 2496 - protein, 130 aa, Homo sapiens
MADVQLVESGGGLVQAGGSLRLSCAASGRPFSSLDMGWFRQRPGKERDVVATINWTGDSTYYLDSVKGRFTISRDNAKNTVFLQMNSLKPEDTAVYYCAARGGGSSVDSEYGVGEFEYDYWGQGTQVTVS

SEQ ID NO: 2497 - protein, 123 aa, Homo sapiens
MADVQLVESGGGLVQAGGSLRLSCAASGRPFSSLDMGWFRQRPGKERDVVATINWTGDSTYYLDSVKGRFTISRDNAKNTVFLQMNSLKPEDTAVYYCAARGGGSSVDSEYDYWGQGTQVTVS

SEQ ID NO: 2498 - protein, 130 aa, Homo sapiens
MADVQLVESGGGLVQAGGSLRLSCAASGRPFSSLDMGWFRQRPGKERDVVATINWTGDSTYYLDSVKGRFTISRDNAKNTVFLQMNSLKPEDTAVYYCAARGGGSSVDSEYDVREFEYDYWGQGTQVTVS

SEQ ID NO: 2499 - protein, 130 aa, Homo sapiens
MADVQLVESGGGLVQAGGSLRLSCAASGRPFSSLDMGWFRQRPGKERDVVATINWTGDSTYYLDSVKGRFTISRDNAKNTVFLQMNSLKPEDTAVYYCAARGGGSSVDSEYDVGKFEYDYWGQGTQVTVS

SEQ ID NO: 2500 - protein, 130 aa, Homo sapiens
MADVQLVESGGGLVQAGGSLRLSCAASGRPFSSLDMGWFRQRPGKERDVVATINWTGDSTYYLDSVKGRFTISRDNAKNTVFLQMNSLKPEDTAVYYCAARGGGSSVDSEYDVGGFEYDYWGQGTQVTVS

SEQ ID NO: 2501 - protein, 130 aa, Homo sapiens
MADVQLVESGGGLVQAGGSLRLSCAASGRPFSSLDMGWFRQRPGKERDVVATINWTGDSTYYLDSVKGRFTISRDNAKNTVFLQMNSLKPEDTAVYYCAARGGGSSVDSEYDVGEYEYDYWGQGTQVTVS

SEQ ID NO: 2502 - protein, 130 aa, Homo sapiens
MADVQLVESGGGLVQAGGSLRLSCAASGRPFSSLDMGWFRQRPGKERDVVATINWTGDSTYYLDSVKGRFTISRDNAKNTVFLQMNSLKPEDTAVYYCAARGGGSSVDSEYDVGEVEYDYWGQGTQVTVS

SEQ ID NO: 2503 - protein, 130 aa, Homo sapiens
MADVQLVESGGGLVQAGGSLRLSCAASGRPFSSLDMGWFRQRPGKERDVVATINWTGDSTYYLDSVKGRFTISRDNAKNTVFLQMNSLKPEDTAVYYCAARGGGSSVDSEYDVGELEYDYWGQGTQVTVS

SEQ ID NO: 2504 - protein, 130 aa, Homo sapiens
MADVQLVESGGGLVQAGGSLRLSCAASGRPFSSLDMGWFRQRPGKERDVVATINWTGDSTYYLDSVKGRFTISRDNAKNTVFLQMNSLKPEDTAVYYCAARGGGSSVDSEYDVGECEYDYWGQGTQVTVS

SEQ ID NO: 2505 - protein, 130 aa, Homo sapiens
MADVQLVESGGGLVQAGGSLRLSCAASGRPFSSLDMGWFRQRPGKERDVVATINWTGDSTYYLDSVKGRFTISRDNAKNTVFLQMNSLKPEDTAVYYCAARGGGSSVDSEYDVEEFEYDYWGQGTQVTVS

SEQ ID NO: 2506 - protein, 130 aa, Homo sapiens
MADVQLVESGGGLVQAGGSLRLSCAASGRPFSSLDMGWFRQRPGKERDVVATINWTGDSTYYLDSVKGRFTISRDNAKNTVFLQMNSLKPEDTAVYYCAARGGGSSVDSEYDIGEFEYDYWGQGTQVTVS

SEQ ID NO: 2507 - protein, 130 aa, Homo sapiens
MADVQLVESGGGLVQAGGSLRLSCAASGRPFSSLDMGWFRQRPGKERDVVATINWTGDSTYYLDSVKGRFTISRDNAKNTVFLQMNSLKPEDTAVYYCAARGGGSSVDSEYDGGEFEYDYWGQGTQVTVS

SEQ ID NO: 2508 - protein, 130 aa, Homo sapiens
MADVQLVESGGGLVQAGGSLRLSCAASGRPFSSLDMGWFRQRPGKERDVVATINWTGDSTYYLDSVKGRFTISRDNAKNTVFLQMNSLKPEDTAVYYCAARGGGSSVDSEYAVGEFEYDYWGQGTQVTVS

SEQ ID NO: 2509 - protein, 129 aa, Homo sapiens
MADVQLVESGGGLVQAGGSLRLSCAASGGTFSSYAMAWFRQAPGKEREFVAEDSWSNHRVWYSDSVKGRFTISRDNAKNTVYLQMNNLKPEDTAVYYCAAYRDYSGSTVDPPNQSEYDYWGQGTQVTVS

SEQ ID NO: 2510 - protein, 127 aa, Homo sapiens
MADVQLVESGGGLVQAGGSLRLSCAAAGRTSSDYAMGWFRQAPGKEREFVAAINWSGISTYYADSVKGRFTISRDNAKNTVHLQMNSLKPEDTAVYYCAAEKLESLRNWHDPLMYDYWGQGTQVTVS

SEQ ID NO: 2511 - protein, 127 aa, Homo sapiens
MADVQLVESGGGLVQAGGSLRLSCAAAGRTSSDYAMGWFRQAPGKEREFVAAINWSGISTYYADSVKGRFTISRDNAKNTVHLQMNSLKAEDTAVYYCAAEKLESLRNWHDPLMYDYWGQGTQVTVS

SEQ ID NO: 2512 - protein, 127 aa, Homo sapiens
MADVQLVESGGGLVQAGGSLRLSCAAAGRTSSDYAMGWFRQAPGKERDFVAAINWSGISTYYADSVKGRFTISRDNAKNTVHLQMNSLKPEDTAVYYCAAEKLESLRNWHDPLMYDYWGQGTQVTVS

SEQ ID NO: 2513 - protein, 127 aa, Homo sapiens
MADVQLVESGGGLVQAGDSLRLSCTASGRTFSTYTMAWFRQAPGKEREFVAAISWSGTYYVDSVKGRFTISRDNAKNTVYLQMNSLKPEDTAVYYCAAVIGSTVDTYSPSDPLEYDYWGQGTQVTVS

SEQ ID NO: 2514 - protein, 127 aa, Homo sapiens
MADVQLVESGGGLVQAGDSLRLSCTASGRTFSTYTMAWFRQAPGKEREFVAAISWSGTYYTDSVKGRFTISRDNAKNTVYLQMNSLKPEDTAVYYCAAVIGSTVDTYSPSDPLEYDYWGQGTQVTVS

SEQ ID NO: 2515 - protein, 127 aa, Homo sapiens
MADVQLVESGGGLVQAGDSLRLSCTASGRTFSTYTMAWFRQAPGKEREFVAAISWSGTYYADSVKGRFTISRDNTKNTVYLQMNSLKPEDTAVYYCAAVIGSTVDTYSPSDPLEYDYWGQGTQVTVS

SEQ ID NO: 2516 - protein, 127 aa, Homo sapiens
MADVQLVESGGGLVQAGDSLRLSCTASGRTFSTYTMAWFRQAPGKEREFVAAISWSGTYYADSVKGRFTISRDNAKNTVYLQMNSLKPEDTAVYYCAAVIGSTVDTYSPSDPLEYDYWGQGTQVTVS

SEQ ID NO: 2517 - protein, 127 aa, Homo sapiens
MADVQLVESGGGLVQAGDSLRLSCTASGRTFSTYTMAWFRQAPGKEREFVAAISWSGTYYADSVKGRFTISRDNAKNTVYLQMNSLKPEDTAVYYCAAVIGSTVDTYSPSDPLEYDYWDQGTQVTVS

SEQ ID NO: 2518 - protein, 127 aa, Homo sapiens
MADVQLVESGGGLVQAGDSLRLSCTASGRTFSTYTMAWFRQAPGKEREFVAAISWSGTYYADSVKGRFTISRDNAKNTVFLQMNSLKPEDTAVYYCAAVIGSTVDTYSPSDPLEYDYWGQGTQVTVS

SEQ ID NO: 2519 - protein, 127 aa, Homo sapiens
MADVQLVESGGGLVQAGDSLRLSCTASGRTFSTYTMAWFRQAPGKEREFVAAISWSGTYYADSVKGRFTISGDNAKNTVYLQMNSLKPEDTAVYYCAAVIGSTVDTYSPSDPLEYDYWGQGTQVTVS

SEQ ID NO: 2520 - protein, 129 aa, Homo sapiens
MADVQLVESGGGLVQAGDSLRLSCAASGRTFSTYTMGWFRQAPGKEREFVAHINWSGGSTNYADSVKGRFTISRDNAKNTVYLQMNSLKPEDTAVYYCAAAIGSSVDSYDHSDPLEYDYWGQGTQVTVS

SEQ ID NO: 2521 - protein, 127 aa, Homo sapiens
MADVQLVESGGGLVQAGDSLRLSCAAAGRTSSDYAMGWFRQAPGKEREFVAAINWSGISTYYADSVKGRFTISRDNAKNTVHLQMNSLKPEDTAVYYCAAEKLESLRNWHDPLMYDYWGQGTQVTVS

SEQ ID NO: 2522 - protein, 129 aa, Homo sapiens
MADVQLVESGGGLVQAGASLRLSCAASGGTLSSYAMAWFRQAPGKEREFVAEDSWSNHRVWYSDSVKGRFTISRDNAKNTVYLQMNNLKPEDTAVYYCAAYRDYSGSTVDPPNQSEYDYWGQGTQVTVS

SEQ ID NO: 2523 - protein, 129 aa, Homo sapiens
MADVQLVESGGGLVQAGASLRLSCAASGGTFSSYAMAWFRQTPGKEREFVAEDSWSNHRVWYSDSVKGRFTISRDNAKNTVYLQMNNLKPEDTAVYYCAAYRDYSGSTVDPPNQSEYDYWGQGTQVTVS

SEQ ID NO: 2524 - protein, 129 aa, Homo sapiens
MADVQLVESGGGLVQAGASLRLSCAASGGTFSSYAMAWFRQAPGKEREFVAEDSWSNHRVWYSDSVKGRFTISRDNTKNTVYLQMNNLKPEDTAVYYCAAYRDYSGSTVDPPNQSEYDYWGQGTQVTVS

SEQ ID NO: 2525 - protein, 129 aa, Homo sapiens
MADVQLVESGGGLVQAGASLRLSCAASGGTFSSYAMAWFRQAPGKEREFVAEDSWSNHRVWYSDSVKGRFTISRDNAKNTVYLQMNNLKPEDTVVYYCAAYRDYSGSTVDPPNQSEYDYWGQGTQVTVS

SEQ ID NO: 2526 - protein, 129 aa, Homo sapiens
MADVQLVESGGGLVQAGASLRLSCAASGGTFSSYAMAWFRQAPGKEREFVAEDSWSNHRVWYSDSVKGRFTISRDNAKNTVYLQMNNLKPEDTAVYYCAAYRDYSGSTVDPPNQSEYDYWGQGTQVTVS

SEQ ID NO: 2527 - protein, 129 aa, Homo sapiens
MADVQLVESGGGLVQAGASLRLSCAASGGTFSSYAMAWFRQAPGKEREFVAEDSWSNHRVWYSDSVKGRFTISRDNAKNMVYLQMNNLKPEDTAVYYCAAYRDYSGSTVDPPNQSEYDYWGQGTQVTVS

SEQ ID NO: 2528 - protein, 129 aa, Homo sapiens
MADVQLVESGGGLVQAGASLRLSCAASGGTFSSYAMAWFRQAPGKEREFVAEDSWSNHRVWYSDSVKGRFTISRDNAKDTVYLQMNNLKPEDTAVYYCAAYRDYSGSTVDPPNQSEYDYWGQGTQVTVS

SEQ ID NO: 2529 - protein, 129 aa, Homo sapiens
MADVQLVESGGGLVQAGASLRLSCAASGGTFSSYAMAWFRQAPGKEHEFVAEDSWSNHRVWYSDSVKGRFTISRDNAKNTVYLQMNNLKPEDTAVYYCAAYRDYSGSTVDPPNQSEYDYWGQGTQVTVS

SEQ ID NO: 2530 - protein, 127 aa, Homo sapiens
MADVQLVESGGDSVRPGDSLRLSCTASGWSLDYYAVGWFRQAPGKEREGVACITSSDGSTYYADSVKGRFTISKDNADNTIYLQMNSLRPEDTAVYYCAVDPRVRYYGGRCDDAYDYWGQGTQVTVS

SEQ ID NO: 2531 - protein, 127 aa, Homo sapiens
MADVQLVESGGDSVQSGGSLRLSCAASDVVLDYLPVGWFRQAPGKEREGVACITSSDGSTYYADSVKGRFTISRDVAKNTVFLQMNSLKPEDTAIYYCATDPRVRYYGGRCDDAYDYWGQGTQVTVS

SEQ ID NO: 2532 - protein, 127 aa, Homo sapiens
MADVQLVESGGDSVPSGGSLRLSCTASGWTLQYYAIGWFRQAPGKEREGVACITSSDGSTYYADSVKGRFTISRDSDKNTVYLQMNNLKPEDTGIYYCAADPRVRYYGGRCDDEYDFWGQGTQVTVS

SEQ ID NO: 2533 - protein, 127 aa, Homo sapiens
MADVQLVESGGDQVQAGGSLRLSCTASGWTLQYYAIGWFRQAPGKEREGVACITSSDGSTYYTDSVKGRFTISRDSDKNMIYLQMNSLKPEDTTIYYCAADPRVRYYGGRCDDEYDFWGQGTQVTVS

SEQ ID NO: 2534 - protein, 127 aa, Homo sapiens
MADVQLVESGGDQVQAGGSLRLSCTASGWTLQYYAIGWFRQAPGKEREGVACITSSDGSTYYTDSVKGRFTISRDSDKNMIYLQMNSLKPEDTAIYYCATDPRVRYYGGRCDDEYDFWGQGTQVTVS

SEQ ID NO: 2535 - protein, 127 aa, Homo sapiens
MADVQLVESGGDQVQAGGSLRLSCTASGWTLQYYAIGWFRQAPGKEREGVACITSSDGSTYYTDSVKGRFTISRDSDKNMIYLQMNSLKPEDTAIYYCAADPRVRYYGGRCDDEYDFWGQGTQVTVS

SEQ ID NO: 2536 - protein, 127 aa, Homo sapiens
MADVQLVESGGDQVQAGGSLRLSCTASGWTLQYYAIGWFRQAPGKEREGVACITSSDGSTYYTDSVKGRFTISRDSDKNMIYLQMNSLKPEDTAIYYCAADPRVHYYGGRCDDEYDFWGQGTQVTVS

SEQ ID NO: 2537 - protein, 13 aa, Homo sapiens
RIEAIPQIDKYLK

SEQ ID NO: 2538 - protein, 32 aa, Homo sapiens
NTVYLQMNSLKPEDTAVYYCAAGLQYGITSLR

SEQ ID NO: 2539 - protein, 15 aa, Homo sapiens
YEEHLYERDEGDKWR

SEQ ID NO: 2540 - protein, 30 aa, Homo sapiens
DNAKNTVYLQMNSLKPEDTAVYYCNVPYYR

SEQ ID NO: 2541 - protein, 12 aa, Homo sapiens
VDFLSKLPEMLK

SEQ ID NO: 2542 - protein, 22 aa, Homo sapiens
EDGYEYDAWGQGTQVTVSSEPK

SEQ ID NO: 2543 - protein, 48 aa, Homo sapiens
NTVYLQMNSLKPEDTAVYYCNVPYYREDGYEYDAWGQGTQVTVSSEPK

SEQ ID NO: 2544 - protein, 16 aa, Homo sapiens
ISSGGSTNYADSVKGR

SEQ ID NO: 2545 - protein, 19 aa, Homo sapiens
SDLEVLFQGPLGSPEFPGR

SEQ ID NO: 2546 - protein, 11 aa, Homo sapiens
ASMTGGQQMGR

SEQ ID NO: 2547 - protein, 11 aa, Homo sapiens
KRIEAIPQIDK

SEQ ID NO: 2548 - protein, 17 aa, Homo sapiens
LLLEYLEEKYEEHLYER

SEQ ID NO: 2549 - protein, 24 aa, Homo sapiens
SSKYIAWPLQGWQATFGGGDHPPK

SEQ ID NO: 2550 - protein, 12 aa, Homo sapiens
DFETLKVDFLSK

SEQ ID NO: 2551 - protein, 7 aa, Homo sapiens
QAPGKQR

SEQ ID NO: 2552 - protein, 11 aa, Homo sapiens
IAYSKDFETLK

SEQ ID NO: 2553 - protein, 30 aa, Homo sapiens
DNAKNTVYLQMNSLKPEDTAVYYCTVPHYR

SEQ ID NO: 2554 - protein, 19 aa, Homo sapiens
LSCAASGSTFDTNPIGWYR

SEQ ID NO: 2555 - protein, 12 aa, Homo sapiens
IEAIPQIDKYLK

SEQ ID NO: 2556 - protein, 21 aa, Homo sapiens
ELVAALTGGGNTNYADSVKGR

SEQ ID NO: 2557 - protein, 6 aa, Homo sapiens
YLKSSK

SEQ ID NO: 2558 - protein, 23 aa, Homo sapiens
DTVDLQMNSLKPEDTAVYYCSAK

SEQ ID NO: 2559 - protein, 9 aa, Homo sapiens
KYCGSTYNR

SEQ ID NO: 2560 - protein, 15 aa, Homo sapiens
DGAKDTVDLQMNSLK

SEQ ID NO: 2561 - protein, 9 aa, Homo sapiens
IKGLVQPTR

SEQ ID NO: 2562 - protein, 20 aa, Homo sapiens
AEGYDYWGQGTQVTVSSEPK

SEQ ID NO: 2563 - protein, 21 aa, Homo sapiens
ELVAAISSGGSANYADSVKGR

SEQ ID NO: 2564 - protein, 7 aa, Homo sapiens
LERPHRD

SEQ ID NO: 2565 - protein, 25 aa, Homo sapiens
DNAKNTVYLQMNSLKPEDTAVYYCR

SEQ ID NO: 2566 - protein, 21 aa, Homo sapiens
NTVYLQMNSLKPEDTAVYYCR

SEQ ID NO: 2567 - protein, 10 aa, Homo sapiens
IYYTESVKGR

SEQ ID NO: 2568 - protein, 14 aa, Homo sapiens
EREIVAAKNWSGAR

SEQ ID NO: 2569 - protein, 15 aa, Homo sapiens
QAPGKDRDFVAAINR

SEQ ID NO: 2570 - protein, 23 aa, Homo sapiens
NTVYLQLNSLKPEDTAVYYCAAR

SEQ ID NO: 2571 - protein, 14 aa, Homo sapiens
SGVITNYADSVKGR

SEQ ID NO: 2572 - protein, 23 aa, Homo sapiens
NTVSLQMNSLKPEDTAVYYCNVR

SEQ ID NO: 2573 - protein, 7 aa, Homo sapiens
DEGDKWR

SEQ ID NO: 2574 - protein, 7 aa, Homo sapiens
QAPGKER

SEQ ID NO: 2575 - protein, 7 aa, Homo sapiens
QRPGKER

SEQ ID NO: 2576 - protein, 14 aa, Homo sapiens
DGGTTYYADSVKGR

SEQ ID NO: 2577 - protein, 22 aa, Homo sapiens
DPAQVQLVESGGGLVQAGASLR

SEQ ID NO: 2578 - protein, 27 aa, Homo sapiens
DNAKYTTYLQMNSLKPEDTAVYYCNVR

SEQ ID NO: 2579 - protein, 22 aa, Homo sapiens
DPAHVQLVESGGGLVQAGGSLR

SEQ ID NO: 2580 - protein, 17 aa, Homo sapiens
IAYSKDFETLKVDFLSK

SEQ ID NO: 2581 - protein, 20 aa, Homo sapiens
KFELGLEFPNLPYYIDGDVK

SEQ ID NO: 2582 - protein, 22 aa, Homo sapiens
DPAQVQLVESGGGLVQAGGSLR

SEQ ID NO: 2583 - protein, 34 aa, Homo sapiens
MASMTGGQQMGRDPADVQLVESGGGLVQAGGSLR

SEQ ID NO: 2584 - protein, 8 aa, Homo sapiens
SPILGYWK

SEQ ID NO: 2585 - protein, 22 aa, Homo sapiens
DPADVQLVESGGGLVQAGGSLK

SEQ ID NO: 2586 - protein, 22 aa, Homo sapiens
LLLEYLEEKYEEHLYERDEGDK

SEQ ID NO: 2587 - protein, 11 aa, Homo sapiens
MSPILGYWKIK

SEQ ID NO: 2588 - protein, 17 aa, Homo sapiens
SLHTLFGDKLCTVATLR

SEQ ID NO: 2589 - protein, 13 aa, Homo sapiens
DNAKNTVYLQMNR

SEQ ID NO: 2590 - protein, 11 aa, Homo sapiens
FPKAEFAEVSK

SEQ ID NO: 2591 - protein, 11 aa, Homo sapiens
ANYNDDSVKGR

SEQ ID NO: 2592 - protein, 8 aa, Homo sapiens
KYLYEIAR

SEQ ID NO: 2593 - protein, 23 aa, Homo sapiens
SVSQYDYWGQGTQVTVSEPKTPK

SEQ ID NO: 2594 - protein, 11 aa, Homo sapiens
LAKTYETTLEK

SEQ ID NO: 2595 - protein, 34 aa, Homo sapiens
DNAKNAAYLQMSNLKPEDTAVYYCATGGGLGYYR

SEQ ID NO: 2596 - protein, 15 aa, Homo sapiens
KVPQVSTPTLVEVSR

SEQ ID NO: 2597 - protein, 20 aa, Homo sapiens
YTFQYDYWGQGTQVTVSEPK

SEQ ID NO: 2598 - protein, 17 aa, Homo sapiens
VFDEFKPLVEEPQNLIK

SEQ ID NO: 2599 - protein, 7 aa, Homo sapiens
ATKEQLK

SEQ ID NO: 2600 - protein, 29 aa, Homo sapiens
DPENLYFQGAQVQLVESGGGLVQAGGSLR

SEQ ID NO: 2601 - protein, 21 aa, Homo sapiens
TYETTLEKCCAAADPHECYAK

SEQ ID NO: 2602 - protein, 14 aa, Homo sapiens
SGSSTYYADSVKGR

SEQ ID NO: 2603 - protein, 12 aa, Homo sapiens
SGSSTYYADSVK

SEQ ID NO: 2604 - protein, 28 aa, Homo sapiens
KMSTVATEATMYAYWGHGTQVTVSSEPK

SEQ ID NO: 2605 - protein, 10 aa, Homo sapiens
DVCKNYAEAK

SEQ ID NO: 2606 - protein, 43 aa, Homo sapiens
DNAKNTVYLQMNSLKPEDTAVYYCGAADPMGLGYGLGPRPVDR

SEQ ID NO: 2607 - protein, 11 aa, Homo sapiens
RDAHKSEVAHR

SEQ ID NO: 2608 - protein, 24 aa, Homo sapiens
EREFVSGISWSGSSIDYVDSVKGR

SEQ ID NO: 2609 - protein, 7 aa, Homo sapiens
LKECCEK

SEQ ID NO: 2610 - protein, 22 aa, Homo sapiens
EFVAYIHWSGSSTSYADSVKGR

SEQ ID NO: 2611 - protein, 35 aa, Homo sapiens
DNTKNTMYLQMNSLKPEDTAVYYCTADQYASTLLR

SEQ ID NO: 2612 - protein, 15 aa, Homo sapiens
AVMDDFAAFVEKCCK

SEQ ID NO: 2613 - protein, 16 aa, Homo sapiens
CCKADDKETCFAEEGK

SEQ ID NO: 2614 - protein, 19 aa, Homo sapiens
LSCTASGPKDTPYTMGWFR

SEQ ID NO: 2615 - protein, 12 aa, Homo sapiens
VTKCCTESLVNR

SEQ ID NO: 2616 - protein, 16 aa, Homo sapiens
RPCFSALEVDETYVPK

SEQ ID NO: 2617 - protein, 24 aa, Homo sapiens
DPNSAEVQLVESGGGLVQAGGSLR

SEQ ID NO: 2618 - protein, 9 aa, Homo sapiens
CCTESLVNR

SEQ ID NO: 2619 - protein, 15 aa, Homo sapiens
WSGVSTYYADSVKGR

SEQ ID NO: 2620 - protein, 27 aa, Homo sapiens
DGAKNTLYLQMNSLKPEDTAVYYCAAK

SEQ ID NO: 2621 - protein, 19 aa, Homo sapiens
AAFTECCQAADKAACLLPK

SEQ ID NO: 2622 - protein, 19 aa, Homo sapiens
TPKGGCGGAAALEHHHHHH

SEQ ID NO: 2623 - protein, 9 aa, Homo sapiens
AFKAWAVAR

SEQ ID NO: 2624 - protein, 21 aa, Homo sapiens
NYDFWGQGTQVTVSSEPKTPK

SEQ ID NO: 2625 - protein, 7 aa, Homo sapiens
ISKDNAK

SEQ ID NO: 2626 - protein, 27 aa, Homo sapiens
DNAKNTVLLQMNSLKPEDTAVYYCAAR

SEQ ID NO: 2627 - protein, 23 aa, Homo sapiens
NTVLLQMNSLKPEDTAVYYCAAR

SEQ ID NO: 2628 - protein, 30 aa, Homo sapiens
CCAAADPHECYAKVFDEFKPLVEEPQNLIK

SEQ ID NO: 2629 - protein, 22 aa, Homo sapiens
EFVASISWTYGYTNYANSVKGR

SEQ ID NO: 2630 - protein, 23 aa, Homo sapiens
RGEDPEYDYWGQGTQVTVSSEPK

SEQ ID NO: 2631 - protein, 24 aa, Homo sapiens
DPNSAQVQLVESGGGLVQAGGSLR

SEQ ID NO: 2632 - protein, 22 aa, Homo sapiens
EFVAAITQNGGTTYYADSVKGR

SEQ ID NO: 2633 - protein, 10 aa, Homo sapiens
DAHKSEVAHR

SEQ ID NO: 2634 - protein, 10 aa, Homo sapiens
ECCEKPLLEK

SEQ ID NO: 2635 - protein, 10 aa, Homo sapiens
FKDLGEENFK

SEQ ID NO: 2636 - protein, 7 aa, Homo sapiens
EAPGKGR

SEQ ID NO: 2637 - protein, 31 aa, Homo sapiens
NTVYLEMNNLKPEDTAVYSCGAGVSDYGCYR

SEQ ID NO: 2638 - protein, 23 aa, Homo sapiens
TSGYNYWGQGTQVTVSSEPKTPK

SEQ ID NO: 2639 - protein, 6 aa, Homo sapiens
DSVKGR

SEQ ID NO: 2640 - protein, 15 aa, Homo sapiens
DNAKNTVYLQMNSLK

SEQ ID NO: 2641 - protein, 8 aa, Homo sapiens
HDYNTYYR

SEQ ID NO: 2642 - protein, 27 aa, Homo sapiens
SHCIAEVENDEMPADLPSLAADFVESK

SEQ ID NO: 2643 - protein, 11 aa, Homo sapiens
STHYADSVKGR

SEQ ID NO: 2644 - protein, 25 aa, Homo sapiens
KTVYLQMNSLKPEDTAVYYCAADYR

SEQ ID NO: 2645 - protein, 6 aa, Homo sapiens
HPEAKR

SEQ ID NO: 2646 - DNA, 23 bp, Homo sapiens
gtcctggctgctcttctacaagg

SEQ ID NO: 2647 - DNA, 21 bp, Homo sapiens
cgccatcaaggtaccagttga

SEQ ID NO: 2648 - DNA, 76 bp, Homo sapiens
  misc_feature (38)..(45): n is a, c, g, or t
atctacactctttccctacacgacgctcttccgatctnnnnnnnnatggctcgagtgtgcagctggtggagtctgg

SEQ ID NO: 2649 - DNA, 60 bp, Homo sapiens
  misc_feature (35)..(42): n is a, c, g, or t
gtgactggagttcagacgtgtgctcttccgatctnnnnnnnnggagacggtgacctgggt

SEQ ID NO: 2650 - DNA, 39 bp, Homo sapiens
aatgatacggcgaccaccgagatctacactctttcccta

SEQ ID NO: 2651 - DNA, 46 bp, Homo sapiens
caagcagaagacggcatacgagatttctgaatgtgactggagttca

SEQ ID NO: 2652 - DNA, 26 bp, Homo sapiens
ggtgttcgaccggttcaagcctctgg

SEQ ID NO: 2653 - DNA, 18 bp, Homo sapiens
ttggcgtagcactcgtga

SEQ ID NO: 2654 - DNA, 22 bp, Homo sapiens
tgatgaaaatggcgcagccgcc

SEQ ID NO: 2655 - DNA, 39 bp, Homo sapiens
atttcactcacatagataccactatcattactaacatac

SEQ ID NO: 2656 - protein, 31 aa, Homo sapiens
NTVYLEMNSLKPEDTAVYSCAAGVSDYGCYR

SEQ ID NO: 2657 - protein, 13 aa, Homo sapiens
YCAAAEGLASGSY

SEQ ID NO: 2658 - protein, 13 aa, Homo sapiens
NTVYLQMNSLKPE

SEQ ID NO: 2659 - protein, 41 aa, Homo sapiens
DTSIYYCAATPVFQSMSTMATESVYDYWGQGTQVTVSSEPK

SEQ ID NO: 2660 - protein, 10 aa, Homo sapiens
CAAGSGVGLY

SEQ ID NO: 2661 - protein, 7 aa, Homo sapiens
  MISC_FEATURE (2)..(2): X can be: Y, L, D, R, or I
  MISC_FEATURE (3)..(3): X can be: K or G
  MISC_FEATURE (4)..(4): X can be: R, Y, T, or D
  MISC_FEATURE (5)..(5): X can be: P, D, or R
  MISC_FEATURE (6)..(6): X can be: E, Y, V, P, W, or D
  MISC_FEATURE (7)..(7): X can be: G, W, D, or P
YXXXXXX

SEQ ID NO: 2662 - protein, 7 aa, Homo sapiens
  MISC_FEATURE (2)..(2): X can be: D, P, K, or A
  MISC_FEATURE (3)..(3): X can be: F, P, D, or A
  MISC_FEATURE (4)..(4): X can be: H, T, or G
  MISC_FEATURE (6)..(6): X can be: G or N
  MISC_FEATURE (7)..(7): X can be: R, P, D,  or Y
YXXXLXX

SEQ ID NO: 2663 - protein, 7 aa, Homo sapiens
  MISC_FEATURE (2)..(2): X can be N, Y, V, or G
  MISC_FEATURE (5)..(5): X can be L or W
  MISC_FEATURE (6)..(6): X can be E, G, N, T, or S
  MISC_FEATURE (7)..(7): X can be D or E
LXYRXXX

SEQ ID NO: 2664 - protein, 7 aa, Homo sapiens
  MISC_FEATURE (1)..(1): X can be C, F, Q, S, H, K, L, Y, or R
  MISC_FEATURE (2)..(2): X can be  G, P, A, or N
  MISC_FEATURE (3)..(3): X can be E, S, G, T, P, V, Y, H, or A
  MISC_FEATURE (4)..(4): X can be C, A, S, P, or D
  MISC_FEATURE (5)..(5): X can be I, W, V, T, or A
  MISC_FEATURE (6)..(6): X can be M, Q, or H
  MISC_FEATURE (7)..(7): X can be K, Y, Q, V, or W
XXXXXXX

SEQ ID NO: 2665 - protein, 7 aa, Homo sapiens
  MISC_FEATURE (2)..(2): X can be D, P, K,or A
  MISC_FEATURE (3)..(3): X can be F, P, L, D, or A
  MISC_FEATURE (4)..(4): X can be H, T, or G
  MISC_FEATURE (6)..(6): X can be G, E, N, or R
  MISC_FEATURE (7)..(7): X can be R, P, G, D, or Y
TXXXLXX

SEQ ID NO: 2666 - protein, 7 aa, Homo sapiens
  MISC_FEATURE (1)..(1): X can be E, G, W, D, or I
  MISC_FEATURE (2)..(2): X can be N, G, or C
  MISC_FEATURE (4)..(4): X can be A, H, or D
  misc_feature (5)..(5): Xaa can be any naturally occurring amino acid
  MISC_FEATURE (6)..(6): X can be G, A, or P
  MISC_FEATURE (7)..(7): X can be L, S, or Y
XXRXXXX

SEQ ID NO: 2667 - protein, 7 aa, Homo sapiens
  MISC_FEATURE (1)..(1): X can be R or A
  MISC_FEATURE (2)..(2): X can be K or L
  MISC_FEATURE (6)..(6): X can be L, G, Y, or W
XXGAQXW

SEQ ID NO: 2668 - protein, 609 aa, Homo sapiens [sequence omitted]

1. A method of identifying a group of complementarity determining region (CDR)3, 2 and/or 1 nanobody amino acid sequences (CDR3, CDR2 and/or CDR1 sequences) wherein a reduced number of the CDR3, CDR2 and/or CDR1 sequences are false positives as compared to a control, the method comprising:
a. obtaining a blood sample from a camelid immunized with an antigen;
b. using the blood sample to obtain a nanobody cDNA library;
c. identifying the sequence of each cDNA in the library;
d. isolating nanobodies from the same or a second blood sample from the camelid immunized with the antigen;
e. digesting the nanobodies with trypsin or chymotrypsin to create a group of digestion products;
f. performing a mass spectrometry analysis of the digestion products to obtain mass spectrometry data;
g. selecting sequences identified in step c. that correlate with the mass spectrometry data;
h. identifying sequences of CDR3, CDR2 and/or CDR1 regions in the sequences from step g.; and
i. selecting from the CDR3, CDR2 and/or CDR1 region sequences of step h. those sequences having equal to or more than a required fragmentation coverage percentage; wherein the fragmentation coverage percentage is determined by a formula f(x,chymotrypsin)=0.0023x²−0.0497x+0.7723,x[5,30] when chymotrypsin is used in step e. or a formula f(x,trypsin)=0.00006x²−0.00444x+0.9194, x[5,30] when trypsin is used in step e., and wherein x is the length of the CDR3, CDR2 or CDR1 region sequence, respectively; and
j. wherein the selected sequences of step i. comprise a group having the reduced number of false positive CDR3, CDR2 and/or CDR1 sequences.

2. The method of claim 1, wherein the required fragmentation coverage percentage is about 30.

3. The method of claim 1, wherein the required fragmentation coverage percentage is about 50 and trypsin is used in step e.

4. The method of claim 1, wherein the required fragmentation coverage percentage is about 40 and chymotrypsin is used in step e.

5. The method of claim 1, wherein step d. comprises obtaining plasma from the blood sample and isolating nanobodies using one or more affinity isolation methods.

6. The method of claim 5, wherein the one or more affinity isolation methods of step d. comprise one or more of protein G sepharose affinity chromatography and protein A sepharose affinity chromatography.

7. The method of claim 1, wherein step d. further comprises a functional selection step comprising selecting antigen-specific nanobodies using an antigen-specific affinity chromatography and eluting the antigen-specific nanobodies under varying degrees of stringency thereby creating different nanobody fractions, and performing steps e. through i. on each fraction individually and estimating an affinity of each different step i. CDR3, CDR2 and/or CDR1 region sequence for the antigen based on a relative abundance of the CDR3, CDR2 and/or CDR1 region sequence in each of the nanobody fractions, respectively.

8. The method of claim 7, wherein the antigen-specific affinity chromatography is a resin conjugated to the antigen.

9. The method of claim 7, wherein the antigen-specific affinity chromatography is a resin coupled to maltose binding protein and the antigen.

10. The method of claim 1, further comprising creating a CDR3, CDR2 and/or CDR1 peptide having a sequence identified in step i.

11. The method of claim 1, further comprising creating a nanobody comprising a CDR3, CDR2 and/or CDR1 region having a sequence identified in step i.

12. A nanobody comprising an amino acid sequence selected from SEQ ID NOs: 1-2536 and SEQ ID NOs: 2665-2667.

13. A computer-implemented method, comprising:
receiving a nanobody peptide sequence;
identifying a plurality of complementarity-determining region (CDR) regions of the nanobody peptide sequence, the CDR regions including CDR3, CDR2 and/or CDR1 regions;
applying a fragmentation filter to discard one or more false positive CDR3, CDR2 and/or CDR1 regions of the nanobody peptide sequence;
quantifying an abundance of one or more non-discarded CDR3, CDR2 and/or CDR1 regions of the nanobody peptide sequence; and
inferring an antigen affinity based on the quantified abundance of the one or more non-discarded CDR3, CDR2 and/or CDR1 regions of the nanobody peptide sequence.

14. The computer-implemented method of claim 13, further comprising classifying the one or more non-discarded CDR3, CDR2 and/or CDR1 regions of the nanobody peptide sequence as having a low antigen affinity, mediocre antigen affinity, or high antigen affinity.

15. The method of claim 14, further comprising assembling the one or more non-discarded CDR3, CDR2 and/or CDR1 regions of the nanobody peptide sequence classified as having the high antigen affinity into a nanobody protein.

16. The computer-implemented method of claim 13, wherein the fragmentation filter is configured to require a minimum calculated fragmentation coverage percentage.

17. The computer-implemented method of claim 16, wherein the minimum calculated fragmentation coverage percentage is about 30.

18. The computer-implemented method of claim 17, wherein the minimum calculated fragmentation coverage percentage is about 50 for trypsin-treated samples and about 40 for chymotrypsin-treated samples.

19. The computer-implemented method of claim 13, further comprising:
receiving a plurality of nanobody peptide sequences; and
comparing each of the nanobody peptide sequences to a database to separate the nanobody peptide sequences into an excluded subgroup and a non-excluded subgroup, wherein the nanobody peptide sequences of the excluded subgroup are not found in the database, and wherein the CDR regions are only identified in the nanobody peptide sequences of the non-excluded subgroup.

20. The computer-implemented method of claim 13, wherein the abundance of one or more non-discarded CDR3, CDR2 and/or CDR1 regions of the nanobody peptide sequence is quantified based on relative MS1 ion signal intensities.

21. The computer-implemented method of claim 13, wherein the antigen affinity is inferred using k-means clustering based on epitope similarity.

22. A method for training a deep learning model, comprising:
creating a dataset using the computer-implemented method of claim 13; and
training, using the dataset, a deep learning model to classify nanobody peptide sequences having low antigen affinity and nanobody peptide sequences having high antigen affinity, wherein the dataset comprises a plurality of nanobody peptide sequences and corresponding antigen-affinity labels.

23. The method of claim 22, wherein the deep learning model is a convolutional neural network.

24. A method for determining antigen affinity of nanobody peptide sequences, comprising:
receiving a nanobody peptide sequence;
inputting the nanobody peptide sequence into a trained deep learning model; and
classifying, using the trained deep learning model, the nanobody peptide sequence as having low antigen affinity or high antigen affinity.

25. The method of claim 24, wherein the deep learning model is a convolutional neural network.

26. The method of claim 24, wherein the trained deep learning model is trained.
